(19) United States
(12) Patent Application Publication
(10) Pub. No.: US 2009/0202995 A1
(43) Pub. Date: Aug. 13, 2009

(54) MOLECULAR CARDIOTOXICOLOGY MODELING

(76) Inventors: Donna L. Mendrick, Gaithersburg, MD (US); Kory R. Johnson, Gaithersburg, MD (US)

Correspondence Address: COOLEY GODWARD KRONISH LLP;ATTN: Patent Group, Suite 1100, 777 - 6th Street, NW, WASHINGTON, DC, 20001, US

(21) Appl. No.: 12/064,933

(22) PCT Filed: Aug. 28, 2006
(86) PCT No.: PCT/US2006/033712

§ 371 Date: Sep. 30, 2008

Related U.S. Application Data
(60) Provisional application No. 60/711,444, filed on Aug. 26, 2005.

(51) Int. Cl. C12Q 1/68

(52) U.S. Cl. 435/6

(57) ABSTRACT

The present invention includes methods of predicting cardiotoxicity of test agents and methods of generating cardiotoxicity prediction models using algorithms for analyzing quantitative gene expression information. The invention also includes microarrays, computer systems comprising the toxicity prediction models, as well as methods of using the computer systems by remote users for determining the toxicity of test agents.

### RELATED APPLICATIONS

[0001] This application is entitled to priority pursuant to 35 U.S.C. §119(e) to U.S. provisional patent application No. 60/711,444, which was filed on Aug. 26, 2005, which is incorporated herein in its entirety. This application is related to, but does not claim priority to PCT/U505/011532, which is herein incorporated by reference in its entirety.

### SEQUENCE LISTING SUBMISSION ON COMPACT DISC

[0002] The contents of the submission on compact discs submitted herewith are incorporated herein by reference in their entirety: A compact disc copy of the Sequence Listing (COPY 1) (filename: GENE 127 01WO SeqList.txt, date recorded: Aug. 24, 2006, file size 2,853 kilobytes); a duplicate compact disc copy of the Sequence Listing (COPY 2) (filename: GENE 127 01WO SeqList.txt, date recorded: Aug. 24, 2006, file size 2,853 kilobytes); a duplicate compact disc copy of the Sequence Listing (COPY 3) (filename: GENE 127 01WO SeqList.txt, date recorded: Aug. 24, 2006, file size 2,853 kilobytes); a computer readable format copy of the Sequence Listing (CRF COPY) (filename: GENE 127 01WO SeqList.txt, date recorded: Aug. 24, 2006, file size 2,853 kilobytes).

### BACKGROUND OF THE INVENTION

[0003] The need for methods of assessing the toxic impact of a compound, pharmaceutical agent or environmental pollutant on a cell or living organism has led to the development of procedures which utilize living organisms as biological monitors. The simplest and most convenient of these systems utilize unicellular microorganisms such as yeast and bacteria, since they are the most easily maintained and manipulated. In addition, unicellular screening systems often use easily detectable changes in phenotype to monitor the effect of test compounds on the cell. Unicellular organisms, however, are inadequate models for estimating the potential effects of many compounds on complex multicellular animals, as they do not have the ability to carry out biotransformations.

[0004] The biotransformation of chemical compounds by multicellular organisms is a significant factor in determining the overall toxicity of agents to which they are exposed. Accordingly, multicellular screening systems may be preferred or required to detect the toxic effects of compounds. The use of multicellular organisms as toxicology screening tools has been significantly hampered, however, by the lack of convenient screening mechanisms or endpoints, such as those available in yeast or bacterial systems. Additionally, certain previous attempts to produce toxicology prediction systems have failed to provide the necessary modeling data and statistical information to accurately predict toxic responses (e.g., WO 00/12760, WO 00/47761, WO 00/63435, WO 01/32928, and WO 01/38579).

[0005] The pharmaceutical industry spends significant resources to ensure that therapeutic compounds of interest are not toxic to human beings. This process is lengthy as well as expensive and involves testing in a series of organisms starting with rodents and progressing to dogs or non-human primates. Moreover, modeling methods for designing candidate pharmaceuticals and their synthesis in nucleic acid, peptide or organic compound libraries has increased the need for inexpensive, fast and accurate methods to predict toxic responses. Toxicity modeling methods based on nucleic acid hybridization platforms would allow the use of biological samples from compound-exposed animal tissue or cell samples, such as rat tissues or cells, to detect human organ toxicity much earlier than has been possible to date.

### SUMMARY OF THE INVENTION

[0006] The present invention is based, in part, on the elucidation of the global changes in gene expression in tissues or cells exposed to known toxins, in particular cardiotoxins, as compared to unexposed tissues or cells as well as the identification of individual genes that are differentially expressed upon toxin exposure.

[0007] The invention includes methods of predicting at least one toxic effect of a compound, comprising: detecting the level of expression in cardiac tissues or cells exposed to the compound of two or more genes from Table 1, 2 or 4 and presenting information related to the detection; wherein differential expression of the genes in Table 1, 2 or 4 is indicative of at least one toxic effect. The invention also includes methods of predicting at least one toxic effect of a test compound, comprising: preparing a gene profile from tissues or cells exposed to the test compound; and comparing the gene expression profile to a database comprising quantitative gene expression information for at least one gene or gene fragment of Table 1, 2 or 4 from cardiac tissues or cells that have been exposed to at least one toxin and quantitative gene expression information for at least one gene or gene fragment of Table 1, 2 or 4 from control tissues or cells exposed to the excipients in the toxin formulation, thereby predicting at least one toxic effect of the test compound.

[0008] In various aspects, the invention also includes methods of predicting at least one toxic effect of a test agent by comparing gene expression information from agent-exposed cardiac samples to a database of gene expression information from toxin-exposed and control cardiac samples (vehicle-exposed samples or samples exposed to a non-toxic compound or experimental condition or low levels of a toxic compound). These methods comprise providing or generating quantitative gene expression information from the samples, converting the gene expression information to matrices of logged fold-change values by a robust multi-array (RMA) algorithm, generating a gene regulation score for each gene that is differentially expressed upon exposure to the test agent by a partial least squares (PLS) algorithm, and calculating a sample prediction score for the test agent. This sample prediction score is then compared to a reference prediction score for one or more toxicity models. The sample prediction score can be generated from at least one gene regulation score, or at least about 5, 10, 25, 50, 100, 500 or about 1,000 or more gene regulation scores.

[0009] In various aspects, the invention includes methods of creating a toxicity model. These methods comprise providing or generating quantitative nucleic acid hybridization data for a plurality of genes from cardiac tissues or cells exposed to a toxin and tissues or cells exposed to the toxin vehicle, converting the hybridization data from at least one gene to a gene expression measure, such as logged fold-change value, by a robust multi-array (RMA) algorithm, generating a gene regulation score from gene expression measure for the at least one gene by a partial least squares (PLS) algorithm, and generating a toxicity reference prediction score for the toxin, thereby creating a toxicity model.

[0010] The invention further provides a set of genes or gene fragments, listed in Tables 1, 2 and 4, from which probes can be made and attached to solid supports. These genes serve as a preferred set of markers of cardiotoxicity and can be used with the methods of the invention to predict or monitor a toxic effect of a compound or to modulate the onset or progression of a toxic response.

[0011] In other aspects, the invention includes a computer system comprising a computer readable medium containing a toxicity model for predicting the toxicity of a test agent and software that allows a user to predict at least one toxic effect of a test agent by comparing a sample prediction score for the test agent to a toxicity reference prediction score for the toxicity model.

[0012] In further aspects of the invention, the gene expression information from test agent-exposed tissues or cells may be prepared and transmitted via the Internet for analysis and comparisons to the toxicity models stored on a remote, central server. After processing, the user that sent the text files receives a report indicating the toxicity or non-toxicity of the test agent.

### Tables

[0013] Table 1: Table 1 provides the GLGC identifier (fragment names from Table 2) in relation to the SEQ ID NO. and GenBank Accession number for each of the gene or gene fragments listed in Table 2 (all of which are herein incorporated by reference and replicated in the attached sequence listing). Also included in the Table are gene names and Unigene cluster ID.

[0014] Table 2: Table 2 presents the PLS weight scores (index scores) for each gene from a series of cardiotoxicity models.

[0015] Table 3: Table 3 lists the toxins and negative control compounds used to build and train each cardiotoxicity model. The designation “1” for a particular compound in a particular model indicates that the compound (at the dose indicated) was used to train that model on the “Tox” portion of the model. It means that this compound is known to cause general toxicity and/or the pathology(ies) indicated. The designation “−1” for a particular compound in a particular model indicates that the compound (at the dose indicated) was used to train that model on the “Non-Tox” portion of the model. It means that this compound is known not to cause general toxicity and/or the pathology(ies) indicated. The designation “Not Used” indicates that that compound's data (at the dose indicated) was not used in building the particular model.

[0016] For the general model, “1” indicates compounds that cause toxicity in humans but may or may not cause toxicity in rats; “−1” indicates compounds that do not cause toxicity in humans, but may or may not cause toxicity in rats.

[0017] For the pathology or other compound-grouped models, “1” indicates compounds that cause that pathology or are a part of the compound group being assayed for in humans or, if the pathology or other factor is known to be a rat-specific event, compounds that cause that pathology in rats; “−1” indicates compounds that do not cause that pathology in humans or, if the pathology is known to be a rat-specific event, compounds that do not cause that pathology in rats.

[0018] Table 4: Table 4 supplies information concerning the metabolic pathways in which the genes and gene fragments of Tables 1 and 2 function.

### DETAILED DESCRIPTION

[0019] Many biological functions are accomplished by altering the expression of various genes through transcriptional (e.g. through control of initiation, provision of RNA precursors, RNA processing, etc.) and/or translational control. For example, fundamental biological processes such as cell cycle, cell differentiation and cell death are often characterized by the variations in the expression levels of groups of genes.

[0020] Changes in gene expression are also associated with the effects of various chemicals, drugs, toxins, pharmaceutical agents and pollutants on an organism or cells. For example, the lack of sufficient expression of functional tumor suppressor genes and/or the over expression of oncogene/protooncogenes after exposure to an agent could lead to tumorgenesis or hyperplastic growth of cells (Marshall (1991) Cell 64: 313-326; Weinberg (1991) Science 254:1138-1146). Thus, changes in the expression levels of particular genes (e.g. oncogenes or tumor suppressors) may serve as indicators of the presence and/or progression of toxicity or other cellular responses to exposure to a particular compound.

[0021] Monitoring changes in gene expression may also provide certain advantages during drug screening and development. Often drugs are screened for the ability to interact with an intended target with little or no regard to other effects the drugs may have on cells. These cellular effects may cause toxicity in the whole animal, which prevents the development and clinical use of the potential drug.

[0022] The present inventors have examined cardiac tissue from animals exposed to known cardiotoxins which induce detrimental heart effects in humans and/or nonclinical species, to identify global changes in gene expression and individual changes in gene expression induced by these compounds. These changes in gene expression, which can be detected by producing or obtaining gene expression profiles (an expression level of one or more genes), provide useful toxicity markers that can be used to monitor toxicity and/or toxicity progression by a test compound. Some of these markers may also be used to monitor or detect various disease or physiological states, disease progression, drug efficacy and drug metabolism.

### DEFINITIONS

[0023] As used herein, “nucleic acid hybridization data” refers to any data derived from the hybridization of a sample of nucleic acids to a one or more of a series of reference nucleic acids. Such reference nucleic acids may be in the form of probes on a microarray or may be in the form of primers that are used in polymerization reactions, such as PCR amplification, to detect hybridization of the primers to the sample nucleic acids. Nucleic hybridization data may be in the form of numerical representations of the hybridization and may be derived from quantitative, semi-quantitative or non-quantitative analysis techniques or technology platforms. Nucleic acid hybridization data includes, but is not limited to gene expression data. The data may be in any form, including florescence data or measurements of fluorescence probe intensities from a microarray or other hybridization technology platform. The nucleic acid hybridization data may be raw data or may be normalized to correct for, or take into account, background or raw noise values, including background generated by microarray high/low intensity spots, scratches, high regional or overall background and raw noise generated by scanner electrical noise and sample quality fluctuation.

[0024] As used herein, “cell or tissue samples” refers to one or more samples comprising cell or tissue from an animal or other organism, including laboratory animals such as rats or mice. The cell or tissue sample may comprise a mixed population of cells or tissues or may be substantially a single cell or tissue type. Cell or tissue samples as used herein may also be in vitro grown cells or tissue, such as primary cell cultures, immortalized cell cultures, cultured heart tissue, etc. Cells or tissue may be derived from any organ, including but not limited to, liver, kidney, cardiac, muscle (skeletal or cardiac) or brain. Preferred cells or tissues are cardiac cells or tissues, such as rat cardiac cells or tissues.

[0025] As used herein, “test agent” refers to an agent, compound, biologic such as an antibody, or composition that is being tested or analyzed in a method of the invention. For instance, a test agent may be a pharmaceutical candidate for which toxicology data is desired.

[0026] As used herein, “pathology” refers to an observable endpoint indicative of toxicity as classified by a pathologist or other practitioner with experience in the field. Most models built from expression data are based on compounds that cause common pathology endpoints. However, some models may be based on other factors for which compound commonality can be derived, including structural or mechanistic factors. The term “pathology” is used as the most common embodiment, but generally includes the other factors of compound commonality.

[0027] As used herein, “test agent vehicle” refers to the diluent or carrier in which the test agent is dissolved, suspended in or administered in, to an animal, organism or cells.

[0028] As used herein, “toxin vehicle” refers to the diluent or carrier in which a toxin is dissolved, suspended in or administered in, to an animal, organism or cells.

[0029] As used herein, a “gene expression measure” refers to any numerical representation of the expression level of a gene or gene fragment in a cell or tissue sample. A “gene expression measure” includes, but is not limited to, a fold change value.

[0030] As used herein, “at least one gene” refers to a nucleic acid molecule detected by the methods of the invention in a sample. The term “gene” as used herein, includes fully characterized open reading frames and the encoded mRNA as well as fragments of expressed RNA that are detectable by any hybridization method in the cell or tissue samples assayed as described herein. For instance, a “gene” includes any species of nucleic acid that is detectable by hybridization to a probe in a microarray, such as the “genes” of Tables 1, 2 and 4. As used herein, at least one gene includes a “plurality of genes.”

[0031] As used herein, “fold change value” refers to a numerical representation of the expression level of a gene, genes or gene fragments between experimental paradigms, such as a test or treated cell or tissue sample, compared to any standard or control. For instance, a fold change value may be presented as microarray-derived florescence or probe intensities for a gene or genes from a test cell or tissue sample compared to a control, such as an unexposed cell or tissue sample or a vehicle-exposed cell or tissue sample. An RMA logged fold change value as described herein is a non-limiting example of a fold change value calculated by methods of the invention.

[0032] As used herein, “gene regulation score” refers to a quantitative measure of gene expression for a gene or gene fragment as derived from a weighted index score or PLS score for each gene and the fold change value from treated vs. control samples.

[0033] As used herein, “sample prediction score” refers to a numerical score produced via methods of the invention as herein described. For instance, a “sample prediction score” may be calculated using the weighted index score or PLS score for at least one gene in a gene expression profile generated from the sample and the RMA fold change value for that same gene. A “sample prediction score” is derived from summing the individual gene regulation scores calculated for a given sample.

[0034] As used herein, “toxicity reference prediction score” refers to a numerical score generated from a toxicity model that can be used as a cut-off score to predict at least one toxic effect of a test agent. For instance, a sample prediction score can be compared to a toxicity reference prediction score to determine if the sample score is above or below the toxicity reference prediction score. Sample prediction scores falling below the value of a toxicity reference prediction score are scored as not exhibiting at least one toxic effect and sample prediction scores above the value if a toxicity reference prediction score are scored as exhibiting at least one toxic effect.

[0035] As used herein, a log scale linear additive model includes any log scale linear model such as log scale robust multi-array analysis or RMA (see, for example, Irizarry et al., Nucleic Acids Research 31(4) e15 (2003).

[0036] As used herein, “remote connection” refers to a connection to a server by a means other than a direct hard-wired connection. This term includes, but is not limited to, connection to a server through a dial-up line, broadband connection, Wi-Fi connection, or through the Internet.

[0037] As used herein, a “CEL file” refers to a file that contains the average probe intensities associated with a coordinate position, cell or feature on a microarray. See the Affymetrix GeneChip® Expression Analysis Technical Manual, which is herein incorporated by reference.

[0038] As used herein, a “gene expression profile” comprises any quantitative representation of the expression of at least one mRNA species in a cell sample or population and includes profiles made by various methods such as differential display, PCR, microarray and other hybridization analysis, etc.

[0039] As used herein, a “general toxicity model” refers to a model that is not limited to a specific pathology or mechanism. This category classifies compounds by their ability to induce toxicity in one or more species, including humans.

[0040] As used herein, an “arrhythmia model” refers to a model wherein the condition of the heart is characterized by a disturbance in the electrical activity that manifests as an abnormality in heart rate or heart rhythm. Patients with a cardiac arrhythmia may experience a wide variety of symptoms ranging from palpitations to fainting.

[0041] As used herein, a “myocardial necrosis model” refers to a model wherein an area of necrosis of the heart results from an insufficiency of coronary blood supply.

[0042] As used herein, a “heart failure model” refers to a model of an abnormality of cardiac function where the heart does not pump blood at the rate needed for the requirements of metabolizing tissues. The heart failure can be caused by any number of factors, including ischemic, congenital, rheumatic, or idiopathic forms.

[0043] As used herein, an “adrenergic agonist model” refers a condition where there is ineffective pumping of the heart leading to an accumulation of fluid in the lungs. Typical symptoms include shortness of breath with exertion, difficulty breathing when lying flat and leg or ankle swelling. Causes include chronic hypertension, cardiomyopathy, and myocardial infarction.

[0044] As used herein, “vasculature agents” refers to agents that cause physiological change of the vasculature.

### Methods of Generating Toxicity Models

[0045] To evaluate and identify gene expression changes that are predictive of toxicity, studies using selected compounds with well characterized toxicity may be used to build a model or database of the present invention. In the present studies, the following cardiotoxins and non-cardiotoxins were used to build one or more of the models of the invention: acyclovir, adriamycin, amphotericin B, BI compound, carboplatin, CCl4, cisplatin, clenbuterol, cyclophosphamide, dantrolene, dopamine, epinephrine, epirubicin, famotidine, hydralazine, ifosfamide, imatinib, isoproterenol, minoxidil, monocrotaline, norephinephrine, paroxetine, pentamidine, Pfizer compound, phenylpropanolamine, rosiglitazone, and temozolomide. Methods used to prepare the models of the present invention include an RMA/PLS method (analysis of raw gene expression data by the robust multi-array average algorithm, with evaluation of predictive ability by the partial least squares algorithm).

[0046] In general, the models of the invention are built using cardiac tissue and cell samples that are analyzed after exposure to compounds known to exhibit at least one toxic effect. Compounds that are known not to exhibit at least one toxic effect may also be used as negative controls. The changes in gene expression levels in samples treated with the compound were considered to represent a specific toxic response, and the genes whose expression was up- or down-regulated upon treatment with the compound were classified as marker genes that may be used as indicators of a specific type of toxic response, i.e., a specific type of heart pathology. These marker genes may also be used to prepare reference gene expression profiles that characterize a specific cardiotoxic response. To train a toxicity model that is initially built from a database of gene expression information classified as showing a toxic response or not showing a toxic response, information from samples treated with some compounds is removed from the model, while information from samples treated with other compounds is retained. If the model with the retained information also retains the ability of the original model to distinguish between a toxic response and the lack of a toxic response in test samples compared to the model, the genes in the training model whose expression is up- or down-regulated are used to build a specific toxicity model. These genes are used on the tox side of the training model.

[0047] The toxins and negative control compounds used to build and train each toxicity model are shown in Table 3. The designation “1” for a particular compound in a particular model indicates that the compound was used on the toxicity/pathology (tox) side for training the model. Where a particular compound in a particular model has the designation of “−1”, the gene expression information from samples treated with that compound is considered to represent the absence of a toxic response or pathology. This information was used on the non-tox side, or negative control side, for training a model to produce a specific toxicity model. The genes analyzed in these samples are considered not to be markers of toxicity. Where a particular compound in a particular model has the designation “Not Used,” the compound was not used to train that model.

[0048] In the present invention, a toxicity study or “tox study” comprises a set of cardiac tissues or cells that have been exposed to one or more toxins and may include matched samples exposed to the toxin vehicle or a low, non-toxic, dose of the toxin. As described below, the cell or tissue samples may be exposed to the toxin and control treatments in vivo or in vitro. In some studies, toxin and control exposure to the cell or tissue samples may take place by administering an appropriate dose to an animal model, such as a laboratory rat. In some studies, toxin and control exposure to the cell or tissue samples may take place by administering an appropriate dose to a sample of in vitro grown cells or tissue. These samples are typically organized into cohorts by test compound, time (for instance, time from initial test compound dosage to time at which rats are sacrificed or the time at which RNA is harvested from cell or tissue samples), and dose (amount of test compound administered). All cohorts in a tox study typically share the same vehicle control. For example, a cohort may be a set of samples of tissues or cells from laboratory rats that were treated with isoproterenol for 6 hours at a dosage of 0.5 mg/kg. A time-matched vehicle cohort is a set of samples that serve as controls for treated tissues or cells within a tox study, e.g., for 6-hour isoproterenol-treated samples the time-matched vehicle cohort would be the 6-hour vehicle-treated samples with that study.

[0049] A toxicity database or “tox database” is a set of tox studies that alone or in combination comprise a reference database. For instance, a reference database may include data from rat cardiac tissue and cell samples from rats that were treated with different test compounds at different dosages and exposed to the test compounds for varying lengths of time. A cardiotoxicity database is a set of cardiotoxicity studies that alone or in combination comprises a reference database.

[0050] RMA, or robust multi-array average, is an algorithm that converts raw fluorescence intensities, such as those derived from hybridization of sample nucleic acids to an Affymetrix GeneChip® microarray, into expression values, one value for each gene fragment on a chip (see, for example, Irizarry et al. (2003), Nucleic Acids Res. 31(4):e15, 8 pp.; and Irizarry et al. (2003) “Exploration, normalization, and summaries of high density oligonucleotide array probe level data,” Biostatistics 4(2): 249-264). RMA produces values on a log2 scale, typically between 4 and 12, for genes that are expressed significantly above or below control levels. These RMA values can be positive or negative and are centered around zero for a fold-change of about 1. A matrix of gene expression values generated by RMA can be subjected to PLS to produce a model for prediction of toxic responses, e.g., a model for predicting heart or kidney toxicity. In a preferred embodiment, the model is validated by techniques known to those skilled in the art. Preferably, a cross-validation technique is used. In such a technique, the data is broken into training and test sets several times until an acceptable model success rate is determined. Most preferably, such technique uses a “compound drop” cross-validation, where each compound's set of data is dropped and the data from the remaining compounds are used to rebuild the model. PLS, or Partial Least Squares, is a modeling algorithm that takes as inputs a matrix of predictors and a vector of supervised scores to generate a set of prediction weights for each of the input predictors (see, for example, Nguyen et al. (2002), Bioinformatics 18:39-50). These prediction weights are then used to calculate a gene regulation score to indicate the ability of each analyzed gene to predict a toxic response. As described in the examples, the gene regulation scores may then be used to calculate a toxicity reference prediction score.

[0051] From the nucleic acid hybridization data, a gene expression measure is calculated for one or more genes whose level of expression is detected in the nucleic acid hybridization value. As described above, the gene expression measure may comprise an RMA fold change value. The toxicity reference score=ΣwᵢR^{FCi}. “i” is the index number for each gene in a gene expression profile to be evaluated. “wᵢ” is the PLS weight (or PLS score, see Table 2) for each gene. “R^{FCi}” is the RMA fold-change value for the i^{th} gene, as determined from a normalized RMA matrix of gene expression data from the sample (described above). The PLS weight multiplied by the RMA fold-change value gives a gene regulation score for each gene, and the regulation scores for all the individual genes are added to give a toxicity reference prediction score for a sample or cohort of sample. A toxicity reference prediction score can be calculated from at least one gene regulation score, or at least about 5, 10, 25, 50, 100, 500 or about 1,000 or more gene regulation scores, including gene regulation scores calculated for the genes of the attached Tables, in particular Tables 1 and 2 as herein described.

[0052] In one embodiment of the invention, a toxicology or toxicity model of the invention is prepared or created by the steps of (a) providing nucleic acid hybridization data for a plurality of genes from tissues or cells exposed to a toxin and tissues or cells exposed to the toxin vehicle; (b) converting the hybridization data from at least one gene to a gene expression measure; (c) generating a gene regulation score from gene expression measure for said at least one gene; and (d) generating a toxicity reference prediction score for the toxin, thereby creating a toxicity model. The gene expression measure may be a gene fold change value calculated by a log scale linear additive model such as RMA and the toxicity reference prediction score may be generated with PLS. The toxicity reference prediction score may then be added to a toxicity model or database and be used to predict at least one toxic effect of an unknown test agent or compound.

[0053] In another preferred embodiment, the model is validated by techniques known to those skilled in the art. Preferably, a cross-validation technique is used. In such a technique, the data is broken into training and test sets several times until an acceptable model success rate is determined. Most preferably, such technique uses a “compound drop” cross-validation, where each compound's set of data is dropped and the data from the remaining compounds are used to rebuild the model.

### Methods of Predicting Toxic Effects

[0054] The gene regulation scores and toxicity prediction scores derived from cell or tissue samples exposed to toxins may be used to predict at least one toxic effect, including the cardiotoxicity or other tissue toxicity of a test or unknown agent or compound. The gene regulation scores and toxicity prediction scores from heart cell or tissue samples exposed to toxins may also be used to predict the ability of a test agent or compound to induce tissue pathology, such as arrhythmia, in a sample. The toxicology prediction methods of the invention are limited only by the availability of the appropriate toxicity model and toxicology prediction scores. For instance, the prediction methods of a given system, such as a computer system or database of the invention, can be expanded simply by running new toxicology studies and models of the invention using additional toxins or specific tissue pathology inducing agents and the appropriate cell or tissue samples.

[0055] As used, herein, at least one toxic effect includes, but is not limited to, a detrimental change in the physiological status of a cell or organism. The response may be, but is not required to be, associated with a particular pathology, such as tissue necrosis. Accordingly, the toxic effect includes effects at the molecular and cellular level. Cardiotoxicity, for instance, is an effect as used herein and includes but is not limited to the pathologies of: myocarditis, arrhythmias, tachycardia, myocardial ischemia, myocardial necrosis, heart failure, angina, hypertension, hypotension, dyspnea, and cardiogenic shock.

[0056] In general, assays to predict the toxicity of a test agent (or compound or multi-component composition) comprise the steps of exposing a living animal, such as a laboratory rat, to the test agent or compound, isolating the tissues and cells from the animal, providing nucleic acid hybridization data for at least one gene from the test agent exposed cell or tissue sample(s), by, for instance, assaying or measuring the level of relative or absolute gene expression of one or more of the genes, such as one or more of the genes in Table 1, 2 or 4, calculating a sample prediction score and comparing the sample prediction score to one or more toxicology reference scores (see Example 1).

[0057] Sample prediction scores may be calculated as follows: sample prediction score=ΣwⁱR^{FCi}. “i” is the index number for each gene in a gene expression profile to be evaluated. “wᵢ” is the PLS weight (or PLS score) for each gene derived from a toxicity model. “R^{FCi}” is the RMA fold-change value for the i^{th} gene, as determined from a normalized RMA matrix of gene expression data from the sample (described above). The PLS weight from a given model multiplied by the RMA fold-change value gives a gene regulation score for each gene, and the regulation scores for all the individual genes are added to give a prediction score for the sample. A sample prediction score can be calculated from at least one gene regulation score, or at least about 5, 10, 25, 50, 100, 500 or about 1,000 or more gene regulation scores (or see the numbers of genes below), including gene regulation scores calculated for the genes of the attached Tables, in particulare Tables 1 and 2 as herein described.

[0058] Nucleic acid hybridization data or methods of the invention may include any measurement of the hybridization of sample nucleic acids to probes or gene expression levels corresponding to about 2, 3, 4, 5, 6, 7, 8, 9, 10, 15, 20, 25, 30, 50, 75, 100, 200, 500, 1000 or more genes, or ranges of these numbers, such as about 2-10, about 10-20, about 20-50, about 50-100, about 100-200, about 200-500 or about 500-1000 genes of Table 1, 2 or 4. In an alternate format, PCR technology may be used to measure gene expression levels for these same numbers of genes from Table 1, 2 or 4. Nucleic acid hybridization data for toxicity prediction may also include the measurement of nearly all the genes in a toxicity model. “Nearly all” the genes may be considered to mean at least about 80% of the genes in any one toxicity model. These same numbers of genes may be used a taught herein in any step of the disclosed methods or a genes in a gene expression database as appropriate.

[0059] The methods of the invention to predict at least one toxic effect of a test agent or compound may be practiced by one individual or at one location, or may be practiced by more than one individual or at more than one location. For instance, methods of the invention include steps wherein the exposure of a test agent or compound to a cell or tissue sample(s) is accomplished in one location, nucleic acid processing and the generation of nucleic acid hybridization data takes place at another location and gene regulation and sample prediction scores calculated or generated at another location.

[0060] In another embodiment of the invention, cell or tissue samples are exposed to a test agent or compound by administering the agent to laboratory rats or to cultured heart cells and nucleic acids are processed from selected tissues and hybridized to a microarray to produce nucleic acid hybridization data. The nucleic acid hybridization data is then sent to a remote server comprising a toxicology reference database and software that enables generation of individual gene regulation scores and one or more sample prediction scores from the nucleic acid hybridization data. The software may also enable to user to pre-select specific toxicity models and to compare the generated sample prediction scores to one or more toxicology reference scores contained within a database of such scores. The user may then generate or order an appropriate output product(s) that presents or represents the results of the data analysis, generation of gene regulation scores, sample prediction scores and/or comparisons to one or more toxicology reference scores.

[0061] Data, including nucleic acid hybridization data, may be transmitted to a server via any means available, including a secure direct dial-up or a secure or unsecured internet connection. Toxicology prediction reports or any result of the methods herein may also be transmitted via these same mechanisms. For instance, a first user may transmit nucleic acid hybridization data to a remote server via a secure password protected internet link and then request transmission of a toxicology report from the server via that same internet link.

[0062] Data transmitted by a remote user of a toxicity database or model may be raw, un-normalized data or may be normalized from various background parameters before transmission. For instance, data from a microarray may be normalized for various chip and background parameters such as those described above, before transmission. The data may be in any form, as long as the data can be recognized and properly formatted by available software or the software provided as part of a database or computer system. For instance, microarray data may be provided and transmitted in a CEL file or any other common data files produced from the analysis of microarray based hybridization on commercially available technology platforms (see, for instance, the Affymetrix GeneChip® Expression Analysis Technical Manual available at www.affymetrix.com). Such files may or may not be annotated with various information, for instance, but not limited to, information related to the customer or remote user, cell or tissue sample data or information, hybridization technology or platform on which the data was generated and/or test agent data or information.

[0063] Once data is received, the nucleic acid hybridization data may be screened for database compatibility by any available means. In one embodiment, commonly available data quality control metrics can be applied. For instance, outlier analysis methods or techniques may be utilized to identify samples incompatible with the database, for instance, samples exhibiting erroneous florescence values from control probes which are common between the data and the database or toxicity model. In addition, various data QC metrics can be applied, including one or more disclosed in PCT/US03/24160, filed Aug. 1, 2003, which claims priority to U.S. provisional application 60/399,727.

### Cell or Tissue Sample Preparation

[0064] As described above, the cell population that is exposed to the test agent, compound or composition may be exposed in vitro or in vivo. For instance, cultured or freshly isolated heart cells, in particular rat heart cells, may be exposed to the agent under standard laboratory and cell culture conditions. In another assay format, in vivo exposure may be accomplished by administration of the agent to a living animal, for instance a laboratory rat.

[0065] Procedures for designing and conducting toxicity tests in in vitro and in vivo systems are well known, and are described in many texts on the subject, such as Loomis et al., Loomis's Essentials of Toxicology, 4th Ed., Academic Press, New York, 1996; Echobichon, The Basics of Toxicity Testing, CRC Press, Boca Raton, 1992; Frazier, editor, In Vitro Toxicity Testing, Marcel Dekker, New York, 1992; and the like.

[0066] In in vivo toxicity testing, two groups of test organisms are usually employed. One group serves as a control, and the other group receives the test compound in a single dose (for acute toxicity tests) or a regimen of doses (for prolonged or chronic toxicity tests). Because, in some cases, the extraction of tissue as called for in the methods of the invention requires sacrificing the test animal, both the control group and the group receiving compound must be large enough to permit removal of animals for sampling tissues, if it is desired to observe the dynamics of gene expression through the duration of an experiment.

[0067] In setting up a toxicity study, extensive guidance is provided in the literature for selecting the appropriate test organism for the compound being tested, route of administration, dose ranges, and the like. Water or physiological saline (0.9% NaCl in water) is the solute of choice for the test compound since these solvents permit administration by a variety of routes. When this is not possible because of solubility limitations, vegetable oils such as corn oil or organic solvents such as propylene glycol may be used.

[0068] Regardless of the route of administration, the volume required to administer a given dose is limited by the size of the animal that is used. It is desirable to keep the volume of each dose uniform within and between groups of animals. When rats or mice are used, the volume administered by the oral route generally should not exceed about 0.005 ml per gram of animal. Even when aqueous or physiological saline solutions are used for parenteral injection the volumes that are tolerated are limited, although such solutions are ordinarily thought of as being innocuous. The intravenous LD₅₀ of distilled water in the mouse is approximately 0.044 ml per gram and that of isotonic saline is 0.068 ml per gram of mouse. In some instances, the route of administration to the test animal should be the same as, or as similar as possible to, the route of administration of the compound to humans for therapeutic purposes.

[0069] When a compound is to be administered by inhalation, special techniques for generating test atmospheres are necessary. The methods usually involve aerosolization or nebulization of fluids containing the compound. If the agent to be tested is a fluid that has an appreciable vapor pressure, it may be administered by passing air through the solution under controlled temperature conditions. Under these conditions, dose is estimated from the volume of air inhaled per unit time, the temperature of the solution, and the vapor pressure of the agent involved. Gases are metered from reservoirs. When particles of a solution are to be administered, unless the particle size is less than about 2 μm the particles will not reach the terminal alveolar sacs in the lungs. A variety of apparati and chambers are available to perform studies for detecting effects of irritant or other toxic endpoints when they are administered by inhalation. The preferred method of administering an agent to animals is via the oral route, either by intubation or by incorporating the agent in the feed.

[0070] When the agent is exposed to cells in vitro or in cell culture, the cell population to be exposed to the agent may be divided into two or more subpopulations, for instance, by dividing the population into two or more identical aliquots. In some preferred embodiments of the methods of the invention, the cells to be exposed to the agent are derived from heart tissue. For instance, cultured or freshly isolated rat heart cells may be used.

[0071] The methods of the invention may be used generally to predict at least one toxic response, and, as described in the Examples, may be used to predict the likelihood that a compound or test agent will induce various specific pathologies, such as arrhythmias, myocardial necrosis, heart failure, or other pathologies associated with at least one known toxin. The methods of the invention may also be used to determine the similarity of a toxic response to one or more individual compounds. In addition, the methods of the invention may be used to predict or elucidate the potential cellular pathways influenced, induced or modulated by the compound or test agent.

### Databases and Computer Systems

[0072] Databases and computer systems of the present invention typically comprise one or more data structures, saved to a computer readable medium, comprising toxicity or toxicology models as described herein, including models comprising individual gene or toxicology marker weighted index scores or PLS scores (See Table 2), gene regulation scores, sample prediction scores and/or toxicity reference prediction scores. Such databases and computer systems may also comprise software that allows a user to manipulate the database content or to calculate or generate scores as described herein, including individual gene regulation scores and sample prediction scores from nucleic acid hybridization data. The software may also allow the user to compare one or more sample prediction scores to one or more toxicity reference paradigm scores in at least one toxicity model.

[0073] As discussed above, the databases and computer systems of the invention may comprise equipment and software that allow access directly or through a remote link, such as direct dial-up access or access via a password protected Internet link. Any available hardware may be used to create computer systems of the invention. Any appropriate computer platform, user interface, etc. may be used to perform the necessary comparisons between sequence information, gene or toxicology marker information and any other information in the database or information provided as an input. For example, a large number of computer workstations are available from a variety of manufacturers. Client/server environments, database servers and networks are also widely available and appropriate platforms for the databases of the invention.

[0074] The databases may be designed to include different parts, for instance a sequence database and a toxicology reference database. Methods for the configuration and construction of such databases and computer-readable media containing such databases are widely available, for instance, see U.S. Publication No. 2003/0171876 (Ser. No. 10/090,144), filed Mar. 5, 2002, PCT Publication No. WO 02/095659, published Nov. 23, 2002, and U.S. Pat. No. 5,953,727, which are herein incorporated by reference in their entirety. In a preferred embodiment, the database is a ToxExpress® or BioExpress database marketed by Gene Logic Inc., Gaithersburg, Md. A toxicology database of the invention may include gene expression information for about or at least about 2, 3, 4, 5, 6, 7, 8, 9, 10, 15, 20, 25, 30, 50, 75, 100, 200, 500, 1000 or more genes from Table 2 (or Table 1), wherein the gene expression information is from cardiac tissues or cells exposed in vivo or in vitro to one or more of the toxins or controls as described herein.

[0075] The databases of the invention may be linked to an outside or external database such as GenBank (www.ncbi.nlm.nih.gov/entrez.index.html); KEGG (www.genome.ad.jp/kegg); SPAD (www.grt.kyushu-u.ac.jp/spad/index.html); HUGO (www.gene.ucl.ac.uk/hugo); Swiss-Prot (www.expasy.ch.sprot); Prosite (www.expasy.ch/tools/scnpsitl.html); OMIM (www.ncbi.nlm.nih.gov/omim); and GDB (www.gdb.org). In a preferred embodiment, the external database is GenBank and the associated databases maintained by the National Center for Biotechnology Information (NCBI) (www.ncbi.nlm.nih.gov).

[0076] Any appropriate computer platform, user interface, etc. may be used to perform the necessary comparisons between sequence information, gene expression information and any other information in the database or information provided as an input. For example, a large number of computer workstations are available from a variety of manufacturers, such has those available from Silicon Graphics. Client/server environments, database servers and networks are also widely available and appropriate platforms for the databases of the invention.

[0077] The databases of the invention may be used to produce, among other things, eNortherns™ reports (Gene Logic, Inc) that allow the user to determine the cell type or tissue in which a given gene is expressed and to allow determination of the abundance or expression level of a given gene in a particular tissue or cell.

### Toxicity or Toxicology Reports

[0078] As described above, the methods, databases and computer systems of the invention can be used to produce, deliver and/or send a toxicity, cardiotoxicity or toxicology report. As consistent with the use of the terms “toxicity” and “toxicology” as used herein, a “toxicity report” and a “toxicology report” are interchangeable.

[0079] The toxicity report of the invention typically comprises information or data related to the results of the practice of a method of the invention. For instance, the practice of a method of identifying at least one toxic effect of a test agent or compound as herein described may result in the preparation or production of a report describing the results of the method. The report may comprise information related to the toxic effects predicted by the comparison of at least one sample prediction score to at least one toxicity reference prediction score from the database. The report may also present information concerning the nucleic acid hybridization data, such as the integrity of the data as well as information inputted by the user of the database and methods of the invention, such as information used to annotate the nucleic acid hybridization data.

[0080] As an exemplary, non-limiting example, a toxicity report of the invention may be in a form such as the reports disclosed in PCT/US02/22701, filed Jul. 18, 2002, which is herein incorporated by reference in its entirety. As described elsewhere in this specification, the report may be generated by a server or computer system to which is loaded nucleic acid hybridization data by a user. The report related to that nucleic acid data may be generated and delivered to the user via remote means such as a password secured environment available over the internet or via available computer communication means such as email.

### Generating Nucleic Acid Hybridization Data

[0081] Any assay format to detect gene expression may be used to produce nucleic acid hybridization data. For example, traditional Northern blotting, dot or slot blot, nuclease protection, primer directed amplification, RT-PCR, semi- or quantitative PCR, branched-chain DNA and differential display methods may be used for detecting gene expression levels or producing nucleic acid hybridization data. Those methods are useful for some embodiments of the invention. In cases where smaller numbers of genes are detected, amplification based assays may be most efficient. Methods and assays of the invention, however, may be most efficiently designed with high-throughput hybridization-based methods for detecting the expression of a large number of genes.

[0082] To produce nucleic acid hybridization data, any hybridization assay format may be used, including solution-based and solid support-based assay formats. Solid supports containing oligonucleotide probes for differentially expressed genes of the invention can be filters, polyvinyl chloride dishes, particles, beads, microparticles or silicon or glass based chips, etc. Such chips, wafers and hybridization methods are widely available, for example, those disclosed by Beattie (WO 95/11755).

[0083] Any solid surface to which oligonucleotides can be bound, either directly or indirectly, either covalently or non-covalently, can be used. A preferred solid support is a high density array or DNA chip. These contain a particular oligonucleotide probe in a predetermined location on the array. Each predetermined location may contain more than one molecule of the probe, but each molecule within the predetermined location has an identical sequence. Such predetermined locations are termed features. There may be, for example, from 2, 10, 100, 1000 to 10,000, 100,000 or 400,000 or more of such features on a single solid support. The solid support, or the area within which the probes are attached may be on the order of about a square centimeter. Probes corresponding to the genes or gene fragments of Table 1, 2 or 4 may be attached to single or multiple solid support structures, e.g., the probes may be attached to a single chip or to multiple chips to comprise a chip set. The genes or gene fragments described in the related applications mentioned above may also be attached to these solid supports.

[0084] Oligonucleotide probe arrays for expression monitoring can be made and used according to any techniques known in the art (see for example, Lockhart et al. (1996), Nat Biotechnol 14:1675-1680; McGall et al. (1996), Proc Nat Acad Sci USA 93: 13555-13460). Such probe arrays may contain at least two or more oligonucleotides that are complementary to or hybridize to two or more of the genes or gene fragments described in Table 1, 2 or 4. For instance, such arrays may contain oligonucleotides that are complementary to or hybridize to at least about 2, 3, 4, 5, 6, 7, 8, 9, 10, 20, 30, 50, 70, 100, 500 or 1,000 or more of the genes described herein. Preferred arrays contain all, or substantially all, of the genes or gene fragments listed in Table 1, 2 or 4. As used herein, “substantially all” of the genes in Table 1, 2 or 4 refers to a set of genes or gene fragments containing at least 80% of the genes or gene fragments in Table 1, 2 or 4. In another preferred embodiment, arrays are constructed that contain oligonucleotides to detect all or nearly all of the genes in Table 1, 2 or 4, or a single model of Table 1, 2 or 4, on a single solid support substrate, such as a chip.

[0085] The sequences of the genes and gene fragments of Table 1, 2 or 4 are in the public databases. Table 1 provides the SEQ ID NO: and GenBank Accession Number (NCBI RefSeq ID) for each of the sequences (see www.ncbi.nlm.nih.gov/), as well as the title for the cluster of which gene is part. The sequences of the genes in GenBank are expressly herein incorporated by reference in their entirety as of the filing date of this application, as are related sequences, for instance, sequences from the same gene of different lengths, variant sequences, polymorphic sequences, genomic sequences of the genes and related sequences from different species, including the human counterparts, where appropriate. As described above, in addition to the sequences of the GenBank Accession Numbers disclosed in the Table 1, 2 or 4, sequences such as naturally occurring variant or polymorphic sequences may be used in the methods and compositions of the invention. For instance, expression levels of various allelic or homologous forms of a gene or gene fragment disclosed in Table 1, 2 or 4 may be assayed. Any and all nucleotide variations that do not alter the functional activity of a gene or gene fragment listed in Table 1, 2 or 4, including all naturally occurring allelic variants of the genes herein disclosed, may be used in the methods and to make the compositions (e.g., arrays) of the invention.

[0086] Probes based on the sequences of the genes described above may be prepared by any commonly available method. Oligonucleotide probes for screening or assaying a tissue or cell sample are preferably of sufficient length to specifically hybridize only to appropriate, complementary genes or transcripts. Typically the oligonucleotide probes will be at least about 10, 12, 14, 16, 18, 20 or 25 nucleotides in length. In some cases, longer probes of at least 30, 40, or 50 nucleotides will be desirable.

[0087] As used herein, oligonucleotide sequences that are complementary to one or more of the genes or gene fragments described in Table 1, 2 or 4 refer to oligonucleotides that are capable of hybridizing under stringent conditions to at least part of the nucleotide sequences of said genes. Such hybridizable oligonucleotides will typically exhibit at least about 75% sequence identity at the nucleotide level to said genes, preferably about 80% or 85% sequence identity or more preferably about 90% or 95% or more sequence identity to said genes (see GeneChip® Expression Analysis Manual, Affymetrix, Rev. 3, which is herein incorporated by reference in its entirety).

### Probe Design

[0088] One of skill in the art will appreciate that an enormous number of array designs are suitable for the practice of this invention. The high density array will typically include a number of test probes that specifically hybridize to the sequences of interest. Probes may be produced from any region of the genes or gene fragments identified in Table 1, 2 or 4 and the attached representative sequence listing. In instances where the gene reference in the Tables is a gene fragment, probes may be designed from that sequence or from other regions of the corresponding full-length transcript that may be available in any of the sequence databases, such as those herein described. See WO 99/32660 for methods of producing probes for a given gene or genes. In addition, any available software may be used to produce specific probe sequences, including, for instance, software available from Molecular Biology Insights, Olympus Optical Co. and Biosoft International. In a preferred embodiment, the array will also include one or more control probes.

[0089] High density array chips of the invention include “test probes.” Test probes may be oligonucleotides that range from about 5 to about 500, or about 7 to about 50 nucleotides, more preferably from about 10 to about 40 nucleotides and most preferably from about 15 to about 35 nucleotides in length. In other particularly preferred embodiments, the probes are about 20 or 25 nucleotides in length. In another preferred embodiment, test probes are double or single strand DNA sequences. DNA sequences are isolated or cloned from natural sources or amplified from natural sources using native nucleic acid as templates. These probes have sequences complementary to particular subsequences of the genes whose expression they are designed to detect. Thus, the test probes are capable of specifically hybridizing to the target nucleic acid they are to detect.

[0090] In addition to test probes that bind the target nucleic acid(s) of interest, the high density array can contain a number of control probes. The control probes may fall into three categories referred to herein as 1) normalization controls; 2) expression level controls; and 3) mismatch controls.

[0091] Normalization controls are oligonucleotide or other nucleic acid probes that are complementary to labeled reference oligonucleotides or other nucleic acid sequences that are added to the nucleic acid sample to be screened. The signals obtained from the normalization controls after hybridization provide a control for variations in hybridization conditions, label intensity, “reading” efficiency and other factors that may cause the signal of a perfect hybridization to vary between arrays. In a preferred embodiment, signals (e.g., fluorescence intensity) read from all other probes in the array are divided by the signal (e.g., fluorescence intensity) from the control probes thereby normalizing the measurements.

[0092] Virtually any probe may serve as a normalization control. However, it is recognized that hybridization efficiency varies with base composition and probe length. Preferred normalization probes are selected to reflect the average length of the other probes present in the array, however, they can be selected to cover a range of lengths. The normalization control(s) can also be selected to reflect the (average) base composition of the other probes in the array, however in a preferred embodiment, only one or a few probes are used and they are selected such that they hybridize well (i.e., no secondary structure) and do not match any target-specific probes.

[0093] Expression level controls are probes that hybridize specifically with constitutively expressed genes in the biological sample. Virtually any constitutively expressed gene provides a suitable target for expression level controls. Typically expression level control probes have sequences complementary to subsequences of constitutively expressed “housekeeping genes” including, but not limited to the actin gene, the transferrin receptor gene, the GAPDH gene, and the like. Examples of expression level control probes may be found in U.S. application Ser. Nos. 10/479,866, 10/483,889, 10/620,765 and 10/629,618. Mismatch controls may also be provided for the probes to the target genes, for expression level controls or for normalization controls. Mismatch controls are oligonucleotide probes or other nucleic acid probes identical to their corresponding test or control probes except for the presence of one or more mismatched bases. A mismatched base is a base selected so that it is not complementary to the corresponding base in the target sequence to which the probe would otherwise specifically hybridize. One or more mismatches are selected such that under appropriate hybridization conditions (e.g., stringent conditions) the test or control probe would be expected to hybridize with its target sequence, but the mismatch probe would not hybridize (or would hybridize to a significantly lesser extent). Preferred mismatch probes contain a central mismatch. Thus, for example, where a probe is a 20 mer, a corresponding mismatch probe will have the identical sequence except for a single base mismatch (e.g., substituting a G, a C or a T for an A) at any of positions 6 through 14 (the central mismatch).

[0094] Mismatch probes thus provide a control for non-specific binding or cross hybridization to a nucleic acid in the sample other than the target to which the probe is directed. For example, if the target is present the perfect match probes should be consistently brighter than the mismatch probes. In addition, if all central mismatches are present, the mismatch probes can be used to detect a mutation, for instance, a mutation of a gene or gene fragment in Table 1, 2 or 4. The difference in intensity between the perfect match and the mismatch probe provides a good measure of the concentration of the hybridized material.

[0095] The terms “background” or “background signal intensity” refer to hybridization signals resulting from non-specific binding, or other interactions, between the labeled target nucleic acids and components of the oligonucleotide array (e.g., the oligonucleotide probes, control probes, the array substrate, etc.). Background signals may also be produced by intrinsic fluorescence of the array components themselves. A single background signal can be calculated for the entire array, or a different background signal may be calculated for each target nucleic acid. In a preferred embodiment, background is calculated as the average hybridization signal intensity for the lowest 5% to 10% of the probes in the array, or, where a different background signal is calculated for each target gene, for the lowest 5% to 10% of the probes for each gene. Of course, one of skill in the art will appreciate that where the probes to a particular gene hybridize well and thus appear to be specifically binding to a target sequence, they should not be used in a background signal calculation. Alternatively, background may be calculated as the average hybridization signal intensity produced by hybridization to probes that are not complementary to any sequence found in the sample (e.g. probes directed to nucleic acids of the opposite sense or to genes not found in the sample such as bacterial genes where the sample is mammalian nucleic acids). Background can also be calculated as the average signal intensity produced by regions of the array that lack any probes at all.

[0096] The phrase “hybridizing specifically to” or “specifically hybridizes” refers to the binding, duplexing, or hybridizing of a molecule substantially to or only to a particular nucleotide sequence or sequences under stringent conditions when that sequence is present in a complex mixture (e.g., total cellular) DNA or RNA.

[0097] As used herein a “probe” is defined as a nucleic acid, capable of binding to a target nucleic acid of complementary sequence through one or more types of chemical bonds, usually through complementary base pairing, usually through hydrogen bond formation. As used herein, a probe may include natural (i.e., A, G, U, C, or T) or modified bases (7-deazaguanosine, inosine, etc.). In addition, the bases in probes may be joined by a linkage other than a phosphodiester bond, so long as it does not interfere with hybridization. Thus, probes may be peptide nucleic acids in which the constituent bases are joined by peptide bonds rather than phosphodiester linkages.

### Forming High Density Arrays

[0098] Methods of forming high density arrays of oligonucleotides with a minimal number of synthetic steps are known. The oligonucleotide analogue array can be synthesized on a single or on multiple solid substrates by a variety of methods, including, but not limited to, light-directed chemical coupling, and mechanically directed coupling (see Pirrung, U.S. Pat. No. 5,143,854).

[0099] In brief, the light-directed combinatorial synthesis of oligonucleotide arrays on a glass surface proceeds using automated phosphoramidite chemistry and chip masking techniques. In one specific implementation, a glass surface is derivatized with a silane reagent containing a functional group, e.g., a hydroxyl or amine group blocked by a photolabile protecting group. Photolysis through a photolithogaphic mask is used selectively to expose functional groups which are then ready to react with incoming 5′ photoprotected nucleoside phosphoramidites. The phosphoramidites react only with those sites which are illuminated (and thus exposed by removal of the photolabile blocking group). Thus, the phosphoramidites only add to those areas selectively exposed from the preceding step. These steps are repeated until the desired array of sequences have been synthesized on the solid surface. Combinatorial synthesis of different oligonucleotide analogues at different locations on the array is determined by the pattern of illumination during synthesis and the order of addition of coupling reagents.

[0100] In addition to the foregoing, additional methods which can be used to generate an array of oligonucleotides on a single substrate are described in PCT Publication Nos. WO 93/09668 and WO 01/23614. High density nucleic acid arrays can also be fabricated by depositing pre-made or natural nucleic acids in predetermined positions. Synthesized or natural nucleic acids are deposited on specific locations of a substrate by light directed targeting and oligonucleotide directed targeting. Another embodiment uses a dispenser that moves from region to region to deposit nucleic acids in specific spots.

### Nucleic Acid Samples

[0101] Cell or tissue samples may be exposed to the test agent in vitro or in vivo. When cultured cells or tissues are used, appropriate mammalian cell extracts, such as liver extracts, may also be added with the test agent to evaluate agents that may require biotransformation to exhibit toxicity. In a preferred format, primary isolates, cultured cell lines or freshly isolated or frozen animal or human heart cells may be used.

[0102] The genes which are assayed according to the present invention are typically in the form of mRNA or reverse transcribed mRNA. The genes may or may not be cloned. The genes may or may not be amplified. The cloning and/or amplification do not appear to bias the representation of genes within a population. In some assays, it may be preferable, however, to use polyA+ RNA as a source, as it can be used with less processing steps.

[0103] As is apparent to one of ordinary skill in the art, nucleic acid samples used in the methods and assays of the invention may be prepared by any available method or process. Methods of isolating total mRNA are well known to those of skill in the art. For example, methods of isolation and purification of nucleic acids are described in detail in Chapter 3 of Laboratory Techniques in Biochemistry and Molecular Biology. Vol. 24, Hybridization With Nucleic Acid Probes: Theory and Nucleic Acid Probes, P. Tijssen, Ed., Elsevier Press, New York, 1993. Such samples include RNA samples, but also include cDNA synthesized from a mRNA sample isolated from a cell or tissue of interest. Such samples also include DNA amplified from the cDNA, and RNA transcribed from the amplified DNA. One of skill in the art would appreciate that it is desirable to inhibit or destroy RNase present in homogenates before homogenates are used.

Biological samples may be of any biological tissue or fluid or cells from any organism as well as cells raised in vitro, such as cell lines and tissue culture cells. Frequently the sample will be a tissue or cell sample that has been exposed to a compound, agent, drug, pharmaceutical composition, potential environmental pollutant or other composition. In some formats, the sample will be a “clinical sample” which is a sample derived from a patient. Typical clinical samples include, but are not limited to, sputum, blood, blood-cells (e.g., white cells), tissue or fine needle biopsy samples, urine, peritoneal fluid, and pleural fluid, or cells therefrom. Biological samples may also include sections of tissues, such as frozen sections or formalin fixed sections taken for histological purposes.

### Hybridization

[0104] Nucleic acid hybridization simply involves contacting a probe and target nucleic acid under conditions where the probe and its complementary target can form stable hybrid duplexes through complementary base pairing. See WO 99/32660. The nucleic acids that do not form hybrid duplexes are then washed away leaving the hybridized nucleic acids to be detected, typically through detection of an attached detectable label. It is generally recognized that nucleic acids are denatured by increasing the temperature or decreasing the salt concentration of the buffer containing the nucleic acids. Under low stringency conditions (e.g., low temperature and/or high salt) hybrid duplexes (e.g., DNA:DNA, RNA:RNA, or RNA:DNA) will form even where the annealed sequences are not perfectly complementary. Thus, specificity of hybridization is reduced at lower stringency. Conversely, at higher stringency (e.g., higher temperature or lower salt) successful hybridization tolerates fewer mismatches. One of skill in the art will appreciate that hybridization conditions may be selected to provide any degree of stringency.

[0105] In a preferred embodiment, hybridization is performed at low stringency, in this case in 6×SSPET at 37° C. (0.005% Triton X-100), to ensure hybridization and then subsequent washes are performed at higher stringency (e.g., 1×SSPET at 37° C.) to eliminate mismatched hybrid duplexes. Successive washes may be performed at increasingly higher stringency (e.g., down to as low as 0.25×SSPET at 37° C. to 50° C.) until a desired level of hybridization specificity is obtained. Stringency can also be increased by addition of agents such as formamide. Hybridization specificity may be evaluated by comparison of hybridization to the test probes with hybridization to the various controls that can be present (e.g., expression level control, normalization control, mismatch controls, etc.).

[0106] In general, there is a tradeoff between hybridization specificity (stringency) and signal intensity. Thus, in a preferred embodiment, the wash is performed at the highest stringency that produces consistent results and that provides signal intensity greater than approximately 10% of the background intensity. Thus, in a preferred embodiment, the hybridized array may be washed at successively higher stringency solutions and read between each wash. Analysis of the data sets thus produced will reveal a wash stringency above which the hybridization pattern is not appreciably altered and which provides adequate signal for the particular oligonucleotide probes of interest.

### Signal Detection

[0107] The hybridized nucleic acids are typically detected by detecting one or more labels attached to the sample nucleic acids. The labels may be incorporated by any of a number of means well known to those of skill in the art. See WO 99/32660.

### Kits

[0108] The invention further includes kits combining, in different combinations, high-density oligonucleotide arrays, reagents for use with the arrays, signal detection and array-processing instruments, toxicology databases and analysis and database management software described above. The kits may be used, for example, to predict or model the toxic response of a test compound.

[0109] The databases that may be packaged with the kits are described above. In particular, the database software and packaged information may contain the databases saved to a computer-readable medium, or transferred to a user's local server. In another format, database and software information may be provided in a remote electronic format, such as a website, the address of which may be packaged in the kit.

[0110] Databases and software designed for use with microarrays are discussed in Balaban et al., U.S. Pat. Nos. 6,229,911, a computer-implemented method for managing information collected from small or large numbers of microarrays, and 6,185,561, a computer-based method with data mining capability for collecting gene expression level data, adding additional attributes and reformatting the data to produce answers to various queries. Chee et al., U.S. Pat. No. 5,974,164, disclose a software-based method for identifying mutations in a nucleic acid sequence based on differences in probe fluorescence intensities between wild type and mutant sequences that hybridize to reference sequences.

### Diagnostic Uses for the Toxicity Markers

[0111] As described above, the genes and gene expression information or portfolios of the genes with their expression information as provided in the accompanying Tables may be used as diagnostic markers for the prediction or identification of the physiological state of tissue or cell sample that has been exposed to a compound or to identify or predict the toxic effects of a compound or agent. For instance, a tissue sample such as a sample of peripheral blood cells or some other easily obtainable tissue sample may be assayed by any of the methods described above, and the expression levels from a gene or gene fragment of Table 1, 2 or 4 may be compared to the expression levels found in tissues or cells exposed to the toxins described herein. These methods may result in the diagnosis of a physiological state in the cell or may be used to identify the potential toxicity of a compound, for instance a new or unknown compound or agent. The comparison of expression data, as well as available sequence or other information may be done by researcher or diagnostician or may be done with the aid of a computer and databases as described below.

### Use of the Markers for Monitoring Toxicity Progression

[0112] As described above, the genes and gene expression information provided in Table 1, 2 or 4 may also be used as markers for the monitoring of toxicity progression, such as that found after initial exposure to a drug, drug candidate, toxin, pollutant, etc. For instance, a tissue or cell sample may be assayed by any of the methods described above, and the expression levels from a gene or gene fragment of Table 1, 2 or 4 may be compared to the expression levels found in tissue or cells exposed to the cardiotoxins described herein. The comparison of the expression data, as well as available sequence or other information may be done by researcher or diagnostician or may be done with the aid of a computer and databases.

### Use of the Toxicity Markers for Drug Screening

[0113] According to the present invention, the genes and gene fragments identified in Table 1, 2 or 4 may be used as markers or drug targets to evaluate the effects of a candidate drug, chemical compound or other agent on a cell or tissue sample. The genes may also be used as drug targets to screen for agents that modulate their expression and/or activity. In various formats, a candidate drug or agent can be screened for the ability to stimulate the transcription or expression of a given marker or markers or to down-regulate or counteract the transcription or expression of a marker or markers. According to the present invention, one can also compare the specificity of a drug's effects by looking at the number of markers which the drug induces and comparing them. More specific drugs will have less transcriptional targets. Similar sets of markers identified for two drugs may indicate a similarity of effects.

[0114] Assays to monitor the expression of a marker or markers as defined in Table 1, 2 or 4 may utilize any available means of monitoring for changes in the expression level of the nucleic acids of the invention. As used herein, an agent is said to modulate the expression of a nucleic acid of the invention if it is capable of up- or down-regulating expression of the nucleic acid in a cell.

[0115] In one assay format, gene chips containing probes to one, two or more genes or gene fragments from Table 1, 2 or 4 may be used to directly monitor or detect changes in gene expression in the treated or exposed cell. Cell lines, tissues or other samples are first exposed to a test agent and in some instances, a known toxin, and the detected expression levels of one or more, or preferably 2 or more of the genes or gene fragments of Table 1, 2 or 4 are compared to the expression levels of those same genes exposed to a known toxin alone. Compounds that modulate the expression patterns of the known toxin(s) would be expected to modulate potential toxic physiological effects in vivo. The genes and gene fragments in Table 1, 2 or 4 are particularly appropriate markers in these assays as they are differentially expressed in cells upon exposure to a known cardiotoxin.

[0116] In another format, cell lines that contain reporter gene fusions between the open reading frame and/or the transcriptional regulatory regions of a gene or gene fragment in Table 1, 2 or 4 and any assayable fusion partner may be prepared. Numerous assayable fusion partners are known and readily available including the firefly luciferase gene and the gene encoding chloramphenicol acetyltransferase (Alam et al. (1990) Anal Biochem 188:245-254). Cell lines containing the reporter gene fusions are then exposed to the agent to be tested under appropriate conditions and time. Differential expression of the reporter gene between samples exposed to the agent and control samples identifies agents which modulate the expression of the nucleic acid.

[0117] Additional assay formats may be used to monitor the ability of the agent to modulate the expression of a gene identified in Table 1, 2 or 4. For instance, as described above, mRNA expression may be monitored directly by hybridization of probes to the nucleic acids of the invention. Cell lines are exposed to the agent to be tested under appropriate conditions and time and total RNA or mRNA is isolated by standard procedures such those disclosed in Sambrook et al. (Molecular Cloning: A Laboratory Manual, Third Ed Cold Spring Harbor Laboratory Press, Cold Spring Harbor, N.Y., 2001).

[0118] Agents that are assayed in the above methods can be randomly selected or rationally selected or designed. As used herein, an agent is said to be randomly selected when the agent is chosen randomly without considering the specific sequences involved in the association of a protein of the invention alone or with its associated substrates, binding partners, etc. An example of randomly selected agents is the use a chemical library or a peptide combinatorial library, or a growth broth of an organism.

[0119] As used herein, an agent is said to be rationally selected or designed when the agent is chosen on a nonrandom basis which takes into account the sequence of the target site and/or its conformation in connection with the agent's action. Agents can be rationally selected or rationally designed by utilizing the peptide sequences that make up these sites. For example, a rationally selected peptide agent can be a peptide whose amino acid sequence is identical to or a derivative of any functional consensus site.

[0120] The agents of the present invention can be, as examples, peptides, small molecules, vitamin derivatives, as well as carbohydrates. Dominant negative proteins, DNAs encoding these proteins, antibodies to these proteins, peptide fragments of these proteins or mimics of these proteins may be introduced into cells to affect function. “Mimic” used herein refers to the modification of a region or several regions of a peptide molecule to provide a structure chemically different from the parent peptide but topographically and functionally similar to the parent peptide (see G. A. Grant in: Molecular Biology and Biotechnology, Meyers, ed., pp. 659-664, VCH Publishers, New York, 1995). A skilled artisan can readily recognize that there is no limit as to the structural nature of the agents of the present invention.

[0121] Without further description, it is believed that one of ordinary skill in the art can, using the preceding description and the following illustrative examples, make and utilize the compounds of the present invention and practice the claimed methods. The following working examples therefore, specifically point out the preferred embodiments of the present invention, and are not to be construed as limiting in any way the remainder of the disclosure.

### EXAMPLES

### Example 1

### Generation of Toxicity Models using RMA and PLS

[0122] The cardiotoxins and control compositions including, but not limited to, acyclovir, adriamycin, amphotericin B, BI compound, carboplatin, CCl4, cisplatin, clenbuterol, cyclophosphamide, dantrolene, dopamine, epinephrine, epirubicin, famotidine, hydralazine, ifosfamide, imatinib, isoproterenol, minoxidil, monocrotaline, norephinephrine, paroxetine, pentamidine, Pfizer compound, phenylpropanolamine, rosiglitazone, and temozolomide were administered to male Sprague-Dawley rats at various time points using administration diluents, protocols and dosing regimes described above as well as previously described in the art and in the related applications discussed above.

[0123] After administration, the dosed animals were observed and tissues were collected as described below, although heart tissues were used in the cardiotoxicity models described herein.

### Observation of Animals

[0124] 1. Clinical Observations—Twice daily: mortality and moribundity check. Cage Side Observations—skin and fur, eyes and mucous membrane, respiratory system, circulatory system, autonomic and central nervous system, somatomotor pattern, and behavior pattern. Potential signs of toxicity, including tremors, convulsions, salivation, diarrhea, lethargy, coma or other atypical behavior or appearance, were recorded as they occurred and included a time of onset, degree, and duration.

[0125] 2. Physical Examinations—Prior to randomization, prior to initial treatment, and prior to sacrifice.

[0126] 3. Body Weights—Prior to randomization, prior to initial treatment, and prior to sacrifice.

Clinical Pathology

| | | |
|---|---|---|
| 1. | Frequency | Prior to necropsy. |
| 2. | Number of animals | All surviving animals. |
| 3. | Bleeding Procedure | Blood was obtained by puncture of |
| | | the orbital sinus while under 70% |
| | | CO₂/30% O₂ anesthesia. |
| 4. | Collection of Blood Samples | Approximately 0.5 mL of blood was |
| | | collected into EDTA tubes for |
| | | evaluation of hematology parameters. |
| | | Approximately 1 mL of blood was |
| | | collected into serum separator tubes |
| | | clinical chemistry analysis. |
| | | Approximately 200 μL of plasma was |
| | | obtained and frozen at ~−80° C. for |
| | | test compound/metabolite estimation. |
| | | An additional ~2 mL of blood was |
| | | collected into a 15 mL conical poly- |
| | | propylene vial to which ~3 mL of |
| | | Trizol was immediately added. The |
| | | contents were immediately mixed |
| | | with a vortex and by repeated in- |
| | | version. The tubes were frozen in |
| | | liquid nitrogen and stored at ~−80° C. |

### Termination Procedures

[0127] Terminal Sacrifice

[0128] At the sampling times indicated in Table 3 for each cardiotoxin, and as previously described in the related applications mentioned above, rats were weighed, physically examined, sacrificed by decapitation, and exsanguinated. The animals were necropsied within approximately five minutes of sacrifice. Separate sterile, disposable instruments were used for each animal, with the exception of bone cutters, which were used to open the skull cap. The bone cutters were dipped in disinfectant solution between animals.

[0129] Necropsies were conducted on each animal following procedures approved by board-certified pathologists.

[0130] Animals not surviving until terminal sacrifice were discarded without necropsy (following euthanasia by carbon dioxide asphyxiation, if moribund). The approximate time of death for moribund or found dead animals was recorded.

[0131] Postmortem Procedures

[0132] Fresh and sterile disposable instruments were used to collect tissues. Gloves were worn at all times when handling tissues or vials. All tissues were collected and frozen within approximately 5 minutes of the animal's death. The liver sections, kidneys and hearts were frozen within approximately 3-5 minutes of the animal's death. The time of euthanasia, an interim time point at freezing of liver sections and kidneys, and time at completion of necropsy were recorded. Tissues were stored at approximately −80° C. or preserved in 10% neutral buffered formalin.

[0133] Tissue Collection and Processing

[0134] Liver—

1. Right medial lobe—snap frozen in liquid nitrogen and stored at −80° C.
2. Left medial lobe—Preserved in 10% neutral-buffered formalin (NBF) and evaluated for gross and microscopic pathology.
3. Left lateral lobe—snap frozen in liquid nitrogen and stored at ˜−80° C.

[0135] Heart—

A sagittal cross-section containing portions of the two atria and of the two ventricles was preserved in 10% NBF. The remaining heart was frozen in liquid nitrogen and stored at ˜−80° C.

[0136] Kidneys (both)—

1. Left—Hemi-dissected; half was preserved in 10% NBF and the remaining half was frozen in liquid nitrogen and stored at ˜−80° C.
2. Right—Hemi-dissected; half was preserved in 10% NBF and the remaining half was frozen in liquid nitrogen and stored at ˜−80° C.

[0137] Testes (both)—

A sagittal cross-section of each testis was preserved in 10% NBF. The remaining testes were frozen together in liquid nitrogen and stored at ˜−80° C.

[0138] Brain (whole)—

A cross-section of the cerebral hemispheres and of the diencephalon was preserved in 10% NBF, and the rest of the brain was frozen in liquid nitrogen and stored at ˜−80° C.

[0139] RNA Collection from Tissues or Cells and Processing

[0140] Microarray sample preparation is conducted with minor modifications, following the protocols set forth in the Affymetrix GeneChip® Expression Technical Analysis Manual (Affymetrix, Inc. Santa Clara, Calif.). Frozen cardiac cells are ground to a powder using a Spex Certiprep 6800 Freezer Mill. Total RNA is extracted with Trizol (Invitrogen, Carlsbad Calif.) utilizing the manufacturer's protocol. The total RNA yield for each sample is typically 200-500 μg per 300 mg cells. mRNA is isolated using the Oligotex mRNA Midi kit (Qiagen) followed by ethanol precipitation. Double stranded cDNA is generated from mRNA using the SuperScript Choice system (Invitrogen, Carlsbad Calif.). First strand cDNA synthesis is primed with a T7-(dT24) oligonucleotide. The cDNA is phenol-chloroform extracted and ethanol precipitated to a final concentration of 1 μg/ml. From 2 μg of cDNA, cRNA is synthesized using Ambion's T7 MegaScript in vitro Transcription Kit.

[0141] To biotin label the cRNA, nucleotides Bio-11-CTP and Bio-16-UTP (Enzo Diagnostics) are added to the reaction. Following a 37° C. incubation for six hours, impurities are removed from the labeled cRNA following the RNeasy Mini kit protocol (Qiagen). cRNA is fragmented (fragmentation buffer consisting of 200 mM Tris-acetate, pH 8.1, 500 mM KOAc, 150 mM MgOAc) for thirty-five minutes at 94° C. Following the Affymetrix protocol, 55 μg of fragmented cRNA is hybridized on the Affymetrix rat array set for twenty-four hours at 60 rpm in a 45° C. hybridization oven. The chips are washed and stained with Streptavidin Phycoerythrin (SAPE) (Molecular Probes) in Affymetrix fluidics stations. To amplify staining, SAPE solution is added twice with an anti-streptavidin biotinylated antibody (Vector Laboratories) staining step in between. Hybridization to the probe arrays is detected by fluorometric scanning (Hewlett Packard Gene Array Scanner). Data is analyzed using Affymetrix GeneChip®0 and Expression Data Mining (EDMT) software, the GeneExpress® database, and S-Plus® statistical analysis software (Insightful Corp.).

### Identification of Toxicity Markers and Model Building Using RMA and PLS Algorithms

[0142] RMA/PLS models are built as follows. From DNA microarray data from one or more studies, a matrix of RMA fold-change expression values is generated (in this study, nucleic acid hybridization from heart tissue exposed to various cardiotoxins or control compounds in used). These values are generated, for example, according to the method of Irizarry et al. (Nucl Acids Res 31 (4):e 15, 2003, which is herein incorporated by reference in its entirety), which uses the following equation to produce a log scale linear additive model: T(PMᵢⱼ)=eᵢ+aⱼ+εᵢⱼ. T represents the transformation that corrects for background and normalizes and converts the PM (perfect match) intensities to a log scale. eᵢ represents the log2 scale expression values found on arrays i=1−I, aⱼ represents the log scale affinity effects for probes j=1−J, and εᵢⱼ represents error (to correct for the differences in variances when using probes that bind with different intensities).

[0143] In RMA fold-change matrices, the rows represent individual fragments, and the columns are individual samples. A vehicle cohort median matrix is then calculated, in which the rows represent fragments and the columns represent vehicle cohorts, one cohort for each study/time-point combination. The values in this matrix are the median RMA expression values across the samples within those cohorts. Next, a matrix of normalized RMA expression values is generated, in which the rows represent individual fragments and the columns are individual samples. The normalized RMA values are the RMA values minus the value from the vehicle cohort median matrix corresponding to the time-matched vehicle cohort. Next, the absolute value of the mean of these differences is calculated. These absolute mean difference values serve as the base data on which both fragment selection and PLS modeling is calculated.

[0144] Fragment selection is achieved through several successive steps. Step 1, a “Control Cohort” matrix is created using the absolute mean difference values, where the rows represent fragments and the columns represent vehicle and/or non-cardiotoxin absolute mean difference values for each cohort. Step 2, a “Toxin Cohort” matrix is created using the absolute mean difference values, where the rows represent fragments and the columns represent cardiotoxin absolute mean difference values for each cohort. Step 3, remove fragments from the “Control Cohort” matrix that are uniquely regulated for any single cohort within that matrix. This is done by removing those fragments where the highest absolute mean difference value is 1.25 times greater than the next highest absolute mean difference value. This step is done to reduce the incidence of false-positives due to aberrant unique regulation in the “Control” class. These same fragments are also removed from the “Toxin Cohort” matrix. Step 4, the “Toxin Cohort” matrix is converted to a binary coding based on whether the cardiotoxin absolute mean difference value is 1.25 times greater than or equal to the maximum observed absolute mean difference value in the “Control Cohort” matrix. For each fragment and cohort that meets this criteria, a value of “1” is assigned; otherwise, a value of “0” is assigned. This binary coding is done for each cell of the “Toxin Cohort” matrix. Step 5, a new matrix, the “Toxin Compound” matrix, is created by taking the maximum binary assigned code over each cardiotoxin's cohorts. Therefore, each compound is represented for each fragment with a “1” where any of its treatment cohorts contains a “1” in the “Toxin Cohort” binary matrix, or with a “0” where all of its treatment cohorts contain a “0.” Step 6, each row of the “Toxin Compound” matrix is summed, yielding the number of cardiotoxins that a fragment is regulated by relative to vehicles and non-cardiotoxicants.

[0145] PLS modeling is then applied to the absolute mean difference values (a subset by taking certain fragments as described below), using a −1=non-tox, +1=tox supervised score vector as the dependant variable and the rows of normalized RMA matrix as the independent variables. PLS works by computing a series of PLS components, where each component is a weighted linear combination of fragment values. In this case, the nonlinear iterative partial least squares method is used to compute the PLS components.

[0146] PLS modeling and compound drop cross-validation are then performed based on taking the top N fragments according to the frequency of regulation observed in the “Toxin Compound” matrix, varying N and the number of PLS components, and recording the model success rate for each combination. N is chosen to be the point at which the cross-validated error rate is minimized. In the PLS model, each of those N fragments receives a PLS weight (PLS score) corresponding to the fragment's utility, or predictive ability, in the model (see Table 2 for lists of PLS weight scores for individual genes and gene fragments in the various cardiotoxicity models). Table 2 presents several cardiotoxicity models and includes the gene or gene fragment name for each marker and the corresponding PLS weight or index score for each gene or gene fragment in each model. The models are as follows: general toxicity, adrenergic agonist, arrhythmia, heart failure, myocardial necrosis, and vasculature agent.

[0147] To establish a toxicity prediction score cut-off value for a toxicity model, the true-positive and false positive rates for each possible score cut-off value are computed, using the scores from all tox and non-tox samples in the training set. This generates an ROC curve, which is used to set the cut-off score at the point on the ROC curve corresponding to −5% false positive rate.

[0148] The model can be trained by setting a score of −1 for each gene that cannot predict a toxic response and by setting a score of +1 for each gene that can predict a toxic response. Cross-validation of RMA/PLS models may be performed by the compound-drop method and by the 2/3:1/3 method. In the compound-drop method, sample data from animals treated with one particular test compound are removed from a model, and the ability of this model to predict toxicity is compared to that of a model containing a full data set. In the 2/3:1/3 method, gene expression information from a random third of the genes in the model is removed, and the ability of this subset model to predict toxicity is compared to that of a model containing a full data set.

| Model | Cut-off score |
|---|---|
| general | 1.41 |
| adrenergic agonist | 0.97 |
| arrhythmia | 1.25 |
| heart failure | 1.29 |
| myocardial necrosis | 0.87 |
| vasculature agent | 0.80 |

### Example 2

### Methods of Predicting at Least One Toxic Effect of a Test Agent

[0149] To determine whether or not a cardiac cell or tissue sample such as tissues or cells treated with a test agent or compound exhibits at least one toxic effect or response, RNA is prepared from tissues or cells exposed to the agent and hybridized to a DNA microarray, as described in Example 1 above. From the nucleic acid hybridization data, a prediction score is calculated for that sample and compared to a reference score from a toxicity reference database according to the following equation. The sample prediction score=ΣwᵢR^{FCi}. “i” is the index number for each gene in a gene expression profile to be evaluated. “wᵢ” is the PLS weight score (or PLS index score, see Table 2 for the lists of PLS scores for each cardiotoxicity model) for each gene. “R^{FCi}” is the RMA fold-change value for the i^{th} gene, as determined from a normalized RMA matrix of gene expression data from the sample (described above). The PLS weight multiplied by the RMA fold-change value gives a gene regulation score for each gene, and the regulation scores for all the individual genes are added to give a prediction score for the sample.

[0150] As a quality control (QC) check, for each incoming study, an average correlation assessment may be performed. After the RMA matrix is generated (genes by samples), a Pearson correlation matrix is calculated of the samples to each other. This matrix is samples by samples. For each sample row of the matrix, the mean of all correlation values in that row of the matrix, excluding the diagonal is calculated (which is always 1). This mean is the average correlation for that sample. If the average correlation is less than a threshold (for instance 0.90), the sample is flagged as a potential outlier. This process is repeated for each row (sample) in the study. Outliers flagged by the average correlation QC check are dropped out of any downstream normalization, prediction or compound similarity steps in the process.

[0151] In the cardiotoxicity models of Table 2, the cut-off prediction scores range from about 0.80 to about 1.41, as indicated above. If a sample score, when compared to a particular cardiotoxicity model, e.g. the arrhythmia pathology model, is about 1.25 or above, it can be predicted that the sample shows a toxic response after exposure to the test compound. If the sample score is below 1.25, it can be predicted that the sample does not show a toxic response.

[0152] Compound similarity is assessed in the following way. In the same manner as described above, a cohort fold change vector for each study/time-point/compound/dose combination is calculated. This vector is reduced to only the fragments used in the PLS predictive models. We then calculate Pearson correlations of that cohort fold change vector to each subsetted cohort vector in our reference database. Finally, Pearson correlations are calculated ranked from highest to lowest and the results are stored in the toxicity model and reported.

[0153] A report may be generated comprising information or data related to the results of the methods of predicting at least one toxic effect. The report may comprise information related to the toxic effects predicted by the comparison of at least one sample prediction score to at least one toxicity reference prediction score from the database. The report may also present information concerning the nucleic acid hybridization data, such as the integrity of the data as well as information inputted by the user of the database and methods of the invention, such as information used to annotate the nucleic acid hybridization data. See PCT US02/22701 for a non-limiting example of a toxicity report that may be generated.

[0154] Although the present invention has been described in detail with reference to examples above, it is understood that various modifications can be made without departing from the spirit of the invention. Accordingly, the invention is limited only by the following claims. All cited patents, patent applications and publications referred to in this application are herein incorporated by reference in their entirety.

TABLE 1

| SEQ ID NO. | GLGC ID No. | Fragment Name | GenBank Acc or RefSeq ID No. | Entrez Gene ID | Gene Name | Unigene ID |
|---|---|---|---|---|---|---|
| 1 | 77058 | A03913cds_s_at | A03913 | | | |
| 2 | 77023 | AA684963_at | AA684963 | 293702 | similar to binding protein | Rn.65866 |
| 3 | 77024 | AA685112_at | AA685112 | 293652 | NADH dehydrogenase (ubiquinone) Fe—S protein 8 (predicted) | Rn.3373 |
| 4 | 77026 | AA685376_f_at | AA685376 | | | Rn.25165 |
| 5 | 77028 | AA685903_at | NM_001012197 | 362862 | tumor rejection antigen gp96 (predicted) | Rn.101146 |
| 6 | 77029 | AA686031_at | NM_001005550 | 301458 | NADH dehydrogenase (ubiquinone) Fe—S protein 1, 75 kDa | Rn.1467 |
| 7 | 77030 | AA686579_at | NM_001009672 | 301442 | SMT3 suppressor of mif two 3 homolog 1 (yeast) (predicted) | Rn.1221 |
| 8 | 77032 | AA686870_f_at | AA686870 | | | Rn.25165 |
| 9 | 82173 | AA799389_at | NM_031091 | 81755 | RAB3B, member RAS oncogene family | Rn.3788 |
| 9 | 82174 | AA799389_g_at | NM_031091 | 81755 | RAB3B, member RAS oncogene family | Rn.3788 |
| 10 | 82240 | AA801441_at | NM_031763 | 83572 | platelet-activating factor acetylhydrolase, isoform Ib, alpha subunit 45 kDa | Rn.5827 |
| 11 | 77033 | AA819943_at | AA819943 | | | |
| 12 | 77036 | AA848421_at | AA848421 | 304577 | uracil-DNA glycosylase (predicted) | Rn.104379 |
| 13 | 77037 | AA848546_at | NM_001009542 | 494345 | similar to programmed cell death 10 | Rn.1176 |
| 14 | 76160 | rc_AA818604_s_at | NM_212504 | 294254 | heat shock 70 kD protein 1B | Rn.1950 |
| 14 | 76161 | AA848563_s_at | NM_212504 | 294254 | heat shock 70 kD protein 1B | Rn.1950 |
| 14 | 76534 | L16764_s_at | NM_212504 | 294254 | heat shock 70 kD protein 1B | Rn.1950 |
| 14 | 76766 | Z75029_s_at | NM_212504 | 294254 | heat shock 70 kD protein 1B | Rn.1950 |
| 14 | 79333 | Z27118cds_s_at | NM_212504 | 294254 | heat shock 70 kD protein 1B | Rn.1950 |
| 15 | 77039 | AA875509_at | AA875509 | 314856 | transformed mouse 3T3 cell double minute 2 (predicted) | Rn.91829 |
| 16 | 80380 | AB000098_at | NM_022607 | 64539 | MIPP65 protein | Rn.6452 |
| 17 | 80197 | AB000113_at | NM_017217 | 29485 | solute carrier family 7 (cationic amino acid transporter, y+ system), member 3 | Rn.9804 |
| 18 | 82747 | AB000216_at | NM_134403 | 171440 | ankyrin repeat and BTB (POZ) domain containing 2 | Rn.11149 |
| 19 | 80386 | AB000928_at | NM_053509 | 85271 | zona pellucida glycoprotein 1 | Rn.10890 |
| 20 | 77074 | AB001982_g_at | NM_032075 | 84022 | growth hormone secretagogue receptor | Rn.74241 |
| 21 | 77078 | AB002561_at | NM_021867 | 60464 | fibroblast growth factor 16 | Rn.44348 |
| 22 | 77080 | AB003357_at | NM_019349 | 54308 | serine/threonine kinase 2 | Rn.33275 |
| 23 | 77082 | AB003478_g_at | NM_133553 | 171079 | UDP-Gal:betaGlcNAc beta 1,3-galactosyltransferase, polypeptide 4 | Rn.24575 |
| 24 | 82743 | AB003515_at | NM_022706 | 64670 | GABA(A) receptor-associated protein like 2 | Rn.64537 |
| 25 | 77204 | AB017140_at | NM_031707 | 29546 | homer homolog 1 (Drosophila) | Rn.37500 |
| 25 | 77607 | AF093268_s_at | NM_031707 | 29546 | homer homolog 1 (Drosophila) | Rn.37500 |
| 25 | 80343 | AB003726_at | NM_031707 | 29546 | homer homolog 1 (Drosophila) | Rn.37500 |
| 26 | 77083 | AB003753cds#1_at | AB003753 | | | |
| 27 | 77099 | AB005541_at | AB005541 | | | |
| 28 | 82881 | AB006138_at | NM_031635 | 58924 | fucosyltransferase 2 (secretor status included) | Rn.10678 |
| 29 | 82878 | AB006450_at | NM_019351 | 54311 | translocator of inner mitochondrial membrane 17a (yeast) | Rn.22514 |
| 30 | 82879 | AB006451_at | NM_019352 | 54312 | translocase of inner mitochondrial membrane 23 homolog (yeast) | Rn.2230 |
| 31 | 77104 | AB006710_s_at | NM_057135 | 117276 | 6-phosphofructo-2-kinase/fructose-2,6-biphosphatase 3 | Rn.10791 |
| 32 | 77105 | AB006802_at | AB006802 | | | |
| 33 | 77107 | AB006881mRNA_at | NM_147207 | 259227 | ischemia related factor vof-16 | Rn.38750 |
| 34 | 77111 | AB007689_at | NM_053309 | 29547 | homer homolog 2 (Drosophila) | Rn.30014 |
| 35 | 82920 | AB008538_at | NM_031753 | 79559 | activated leukocyte cell adhesion molecule | Rn.5789 |
| 36 | 77135 | AB010154_at | NM_147135 | 113907 | SH3-binding kinase | Rn.42909 |
| 37 | 77141 | AB010963_s_at | NM_019273 | 29747 | potassium large conductance calcium-activated channel, subfamily M, beta | Rn.10820 |
| | | | | | member 1 | |
| 38 | 77155 | AB011679_at | NM_173102 | 29214 | tubulin, beta 5 | Rn.2458 |
| 38 | 83224 | rc_AA860030_s_at | NM_173102 | 29214 | tubulin, beta 5 | Rn.2458 |
| 39 | 80155 | AB012233_at | AB012233 | 29228 | nuclear factor I/C | Rn.86582 |
| 40 | 80157 | AB012234_g_at | AB012234 | 81524 | nuclear factor I/X | Rn.56776 |
| 41 | 77161 | AB012600_s_at | NM_024362 | 29657 | aryl hydrocarbon receptor nuclear translocator-like | Rn.14532 |
| 41 | 82819 | AF015953_at | NM_024362 | 29657 | aryl hydrocarbon receptor nuclear translocator-like | Rn.14532 |
| 42 | 77162 | AB012933_at | NM_053607 | 94340 | acyl-CoA synthetase long-chain family member 5 | Rn.105862 |
| 43 | 77171 | AB013453_at | NM_013030 | 25548 | solute carrier family 34 (sodium phosphate), member 1 | Rn.92022 |
| 43 | 77173 | AB013455_at | NM_013030 | 25548 | solute carrier family 34 (sodium phosphate), member 1 | Rn.92022 |
| 44 | 77172 | AB013454_at | AB013454 | 360649 | similar to Ac2-210 | Rn.110865 |
| 45 | 77178 | AB015191_at | NM_022505 | 60414 | Rhesus blood group CE and D | Rn.1943 |
| 45 | 77179 | AB015191_g_at | NM_022505 | 60414 | Rhesus blood group CE and D | Rn.1943 |
| 46 | 77190 | AB015946_s_at | NM_145778 | 252921 | tubulin, gamma 1 | Rn.8218 |
| 47 | 77200 | AB016536_s_at | NM_031330 | 83498 | heterogeneous nuclear ribonucleoprotein A/B | Rn.64591 |
| 47 | 81530 | rc_AI104524_s_at | NM_031330 | 83498 | heterogeneous nuclear ribonucleoprotein A/B | Rn.1427 |
| 48 | 77202 | AB017044exon_at | AB017044 | | | |
| 49 | 77206 | AB017170_s_at | NM_022953 | 65047 | slit homolog 1 (Drosophila) | Rn.30002 |
| 50 | 77215 | AB017711_at | NM_031335 | 83503 | polymerase II | Rn.28212 |
| 51 | 77228 | AB020504_g_at | AB020504 | 171453 | PMF32 protein | Rn.13083 |
| 52 | 77235 | AF000900_at | NM_139091 | 245922 | nucleoporin like 1 | Rn.11099 |
| 52 | 81017 | rc_AA891045_at | NM_139091 | 245922 | nucleoporin like 1 | Rn.11099 |
| 53 | 77239 | AF000943_at | NM_022208 | 83830 | general transcription factor 2a, 1 | Rn.44436 |
| 54 | 76391 | AF003523_s_at | NM_022698 | 64639 | bcl2-associated death promoter | Rn.36696 |
| 55 | 77247 | AF004218_s_at | NM_030996 | 29336 | opioid receptor, sigma 1 | Rn.1129 |
| 56 | 82857 | AF004811_at | NM_030863 | 81521 | moesin | Rn.2762 |
| 57 | 77252 | AF008912_at | AF008912 | | | Rn.114289 |
| 58 | 77253 | AF009656mRNA_s_at | NM_012583 | 24465 | hypoxanthine guanine phosphoribosyl transferase | Rn.47 |
| 59 | 82942 | AF014503_at | NM_053611 | 113900 | nuclear protein 1 | Rn.11182 |
| 60 | 80323 | AF016179_at | NM_173315 | 286981 | putative pheromone receptor (Go-VN2) | Rn.10807 |
| 61 | 80326 | AF016182_at | NM_173130 | 286914 | putative pheromone receptor (Go-VN5) | Rn.10810 |
| 62 | 77270 | AF018261_at | NM_057136 | 117277 | Epsin 1 | Rn.30007 |
| 63 | 77271 | AF019624_at | NM_019151 | 29152 | growth differentiation factor 8 | Rn.44460 |
| 64 | 77275 | AF020046_s_at | NM_031768 | 83577 | integrin, alpha E, epithelial-associated | Rn.29975 |
| 65 | 77276 | AF020210_s_at | NM_053655 | 114114 | dynamin 1-like | Rn.10830 |
| 65 | 77277 | AF020211_s_at | NM_053655 | 114114 | dynamin 1-like | Rn.10830 |
| 66 | 78927 | U88324_at | NM_030987 | 24400 | guanine nucleotide binding protein, beta 1 | Rn.126047 |
| 66 | 82918 | AF022083_s_at | NM_030987 | 24400 | guanine nucleotide binding protein, beta 1 | Rn.126047 |
| 67 | 76834 | AF022729_at | NM_080397 | 140568 | carbohydrate sulfotransferase 10 | Rn.11224 |
| 68 | 77284 | AF022742cds_at | NM_031771 | 83580 | thrombomodulin | Rn.88295 |
| 69 | 82949 | AF022774_g_at | NM_133591 | 171123 | rabphilin 3A-like (without C2 domains) | Rn.10986 |
| 70 | 77286 | AF022952_at | AF022952 | 89811 | vascular endothelial growth factor B | Rn.70676 |
| 71 | 77287 | AF023087_s_at | NM_012551 | 24330 | early growth response 1 | Rn.9096 |
| 71 | 78865 | U75397UTR#1_s_at | NM_012551 | 24330 | early growth response 1 | Rn.9096 |
| 72 | 77289 | AF023621_at | AF023621 | 83576 | sortilin 1 | Rn.11286 |
| 73 | 77291 | AF025671_s_at | NM_022522 | 64314 | caspase 2 | Rn.1438 |
| 74 | 80347 | AF026476_at | NM_031777 | 83586 | upstream transcription factor 1 | Rn.10845 |
| 75 | 80348 | AF026529_s_at | AF026529 | 79423 | stathmin-like 4 | Rn.5658 |
| 76 | 77293 | AF027188UTR#1_at | AF027188 | 309037 | similar to RIKEN cDNA 4933424N09 (predicted) | Rn.88644 |
| 77 | 77295 | AF027571_s_at | NM_024353 | 25031 | phospholipase C, beta 4 | Rn.6155 |
| 78 | 77298 | AF028784mRNA#1_s_at | AF028784 | | | |
| 79 | 77300 | AF029357cds_at | NM_001000583 | 366456 | olfactory receptor 857 (predicted) | |
| 80 | 77309 | AF030091UTR#1_g_at | NM_053662 | 114121 | cyclin L1 | Rn.12962 |
| 81 | 77312 | AF030358_g_at | NM_134455 | 89808 | chemokine (C—X3—C motif) ligand 1 | Rn.107266 |
| 82 | 82963 | AF032668_at | NM_019277 | 50556 | SEC15-like 1 (S. cerevisiae) | Rn.1188 |
| 83 | 82964 | AF032669_at | NM_139043 | 245709 | exocyst complex component 8 | Rn.10901 |
| 84 | 77331 | AF034896_f_at | NM_206850 | 294158 | olfactory receptor 1696 | Rn.107045 |
| 85 | 77336 | AF035632_s_at | NM_022939 | 65033 | syntaxin 12 | Rn.54570 |
| 86 | 77339 | AF035952_at | AF035952 | 171291 | kinesin family member 6 | Rn.82703 |
| 87 | 77349 | AF036959_at | NM_031787 | 83617 | homeodomain interacting protein kinase 3 | Rn.8099 |
| 87 | 83287 | rc_AA866455_at | NM_031787 | 83617 | homeodomain interacting protein kinase 3 | Rn.8099 |
| 88 | 82705 | AF037071_at | NM_138922 | 192363 | C-terminal PDZ domain ligand of neuronal nitric oxide synthase | Rn.9903 |
| 89 | 80689 | rc_AI639215_at | NM_131913 | 170751 | X-prolyl aminopeptidase (aminopeptidase P) 1, soluble | Rn.25763 |
| 89 | 82946 | AF038591_at | NM_131913 | 170751 | X-prolyl aminopeptidase (aminopeptidase P) 1, soluble | Rn.25763 |
| 90 | 80379 | AF039085_at | NM_053553 | 89815 | synaptogyrin 2 | Rn.34912 |
| 91 | 77354 | AF039308_at | AF039308 | 83621 | glutaminyl-peptide cyclotransferase (glutaminyl cyclase) | |
| 92 | 82951 | AF040954_at | NM_022951 | 65045 | protein phosphatase 1, regulatory subunit 10 | Rn.37758 |
| 93 | 80384 | AF041107_g_at | AF041107 | 56785 | GTPase activating RANGAP domain-like 1 | Rn.86984 |
| 94 | 77374 | AF044574_at | NM_171996 | 64461 | 2-4-dienoyl-Coenzyme A reductase 2, peroxisomal | Rn.6965 |
| 95 | 82965 | AF044910_at | NM_022509 | 64301 | survival of motor neuron 1, telomeric | Rn.1119 |
| 96 | 77380 | AF048828_at | NM_031353 | 83529 | voltage-dependent anion channel 1 | Rn.54594 |
| 96 | 77381 | AF048828_g_at | NM_031353 | 83529 | voltage-dependent anion channel 1 | Rn.54594 |
| 97 | 77385 | AF050214_at | AF050214 | | | |
| 98 | 77389 | AF050662UTR#1_at | NM_031593 | 29643 | synaptic vesicle glycoprotein 2c | Rn.24210 |
| 98 | 77428 | AF060174_at | NM_031593 | 29643 | synaptic vesicle glycoprotein 2c | Rn.24210 |
| 99 | 77395 | AF051895_at | NM_013132 | 25673 | annexin A5 | Rn.3318 |
| 100 | 77406 | AF053938_s_at | NM_181092 | 192117 | synaptic Ras GTPase activating protein 1 homolog (rat) | Rn.9908 |
| 101 | 80160 | AF053987_at | AF053987 | 297590 | putative pheromone receptor V2R1 | Rn.107049 |
| 102 | 80164 | AF053991_at | NM_173318 | 286984 | putative pheromone receptor (Go-VN4) | Rn.10809 |
| 103 | 77414 | AF055667mRNA_at | AF055667 | | | |
| 104 | 77420 | AF056324_at | NM_022394 | 64196 | scaffold attachment factor B | Rn.88640 |
| 104 | 77421 | AF056324_g_at | NM_022394 | 64196 | scaffold attachment factor B | Rn.88640 |
| 105 | 80256 | AF059258_at | NM_031744 | 65200 | solute carrier family 16, member 8 | Rn.14526 |
| 106 | 82798 | AF059530_at | NM_053557 | 89820 | heterogeneous nuclear ribonucleoprotein methyltransferase-like 3 (S. cerevisiae) | Rn.33389 |
| 107 | 77438 | AF061947_g_at | NM_053575 | 94165 | calcineurin binding protein 1 | Rn.4 |
| 108 | 77441 | AF062594_g_at | NM_053561 | 89825 | nucleosome assembly protein 1-like 1 | Rn.18480 |
| 109 | 77445 | AF062741_g_at | NM_145091 | 246311 | pyruvate dehydrogenase phosphatase isoenzyme 2 | Rn.30021 |
| 110 | 77450 | AF063249_at | NM_022925 | 360417 | protein tyrosine phosphatase, receptor type, Q | Rn.30011 |
| 111 | 82806 | AF063447_at | NM_053563 | 89827 | nuclear RNA helicase, DECD variant of DEAD box family | Rn.14550 |
| 112 | 76776 | U69109_s_at | NM_017318 | 50646 | protein tyrosine kinase 2 beta | Rn.11025 |
| 112 | 77453 | AF063890_s_at | NM_017318 | 50646 | protein tyrosine kinase 2 beta | Rn.11025 |
| 113 | 77456 | AF064868_g_at | NM_024163 | 79146 | brain-enriched guanylate kinase-associated | Rn.30036 |
| 114 | 77460 | AF065387_at | NM_031756 | 81716 | gamma-glutamyl carboxylase | Rn.22410 |
| 115 | 77473 | AF071014mRNA_s_at | NM_024483 | 29413 | adrenergic receptor, alpha 1d | Rn.11314 |
| 116 | 77480 | AF072892_s_at | AF072892 | 114122 | chondroitin sulfate proteoglycan 2 | Rn.35666 |
| 117 | 77481 | AF072935_at | NM_022692 | 64633 | RAB5A, member RAS oncogene family | Rn.44477 |
| 118 | 77483 | AF073891_at | NM_133610 | 171146 | potassium voltage-gated channel, subfamily H (eag-related), member 5 | Rn.48753 |
| 119 | 77491 | AF076183_at | NM_134406 | 171444 | phosphofurin acidic cluster sorting protein 1 | Rn.105884 |
| 119 | 77493 | AF076184_at | NM_134406 | 171444 | phosphofurin acidic cluster sorting protein 1 | Rn.105884 |
| 120 | 77494 | AF076619_at | NM_031623 | 58844 | growth factor receptor bound protein 14 | Rn.30028 |
| 121 | 77496 | AF077000_at | NM_057204 | 117552 | protein tyrosine phosphatase, non-receptor type 23 | Rn.54442 |
| 121 | 77497 | AF077000_g_at | NM_057204 | 117552 | protein tyrosine phosphatase, non-receptor type 23 | Rn.54442 |
| 122 | 77507 | AF079864_at | NM_173293 | 170816 | olfactory receptor 59 | Rn.12541 |
| 123 | 77518 | AF081196_at | NM_019211 | 29434 | RAS guanyl releasing protein 1 | Rn.32156 |
| 124 | 77530 | AF083269_at | NM_019289 | 54227 | actin related protein 2/3 complex, subunit 1B | Rn.2090 |
| 124 | 77531 | AF083269_g_at | NM_019289 | 54227 | actin related protein 2/3 complex, subunit 1B | Rn.2090 |
| 125 | 77537 | AF084576_at | NM_053666 | 114125 | delta-like 3 (Drosophila) | Rn.23105 |
| 126 | 77546 | AF087037_g_at | NM_019290 | 54230 | B-cell translocation gene 3 | Rn.8897 |
| 127 | 77548 | AF087431_g_at | NM_031749 | 78947 | glucosidase 1 | Rn.22161 |
| 128 | 77551 | AF087454_at | NM_031597 | 29682 | potassium voltage-gated channel, subfamily Q, member 3 | Rn.55340 |
| 129 | 77565 | AF090113_at | NM_138535 | 171571 | glutamate receptor interacting protein 2 | Rn.15680 |
| 130 | 77572 | AF090306_s_at | NM_031816 | 83712 | retinoblastoma binding protein 7 | Rn.3600 |
| 131 | 77576 | AF091561_at | NM_001000504 | 308853 | olfactory receptor 37 | Rn.110414 |
| 132 | 77577 | AF091562_s_at | NM_001000507 | 309225 | olfactory receptor 337 | Rn.110431 |
| 133 | 77582 | AF091566_f_at | NM_001006598 | 363546 | olfactory receptor 1362 | Rn.113183 |
| 134 | 77583 | AF091567_s_at | NM_001000724 | 404977 | olfactory receptor 1468 | Rn.129488 |
| 135 | 77591 | AF091577_at | NM_001000979 | 405334 | olfactory receptor 1370 (predicted) | Rn.124616 |
| 136 | 77595 | AF091580_s_at | AF091580 | 296156 | carboxypeptidase X 1 (M14 family) (predicted) | Rn.19382 |
| 137 | 77603 | AF092523_s_at | NM_053665 | 114124 | A kinase (PRKA) anchor protein 1 | Rn.91372 |
| 138 | 77625 | AF099093_g_at | NM_022690 | 64631 | ubiquitin-conjugating enzyme E2G 1 (UBC7 homolog, C. elegans) | Rn.1854 |
| 139 | 77643 | AJ000347_g_at | NM_171990 | 64473 | 3′(2′),5′-bisphosphate nucleotidase | Rn.8453 |
| 140 | 80387 | AJ000485_at | NM_021997 | 29264 | cytoplasmic linker 2 | Rn.10893 |
| 141 | 77645 | AJ000557cds_s_at | NM_031514 | 24514 | Janus kinase 2 | Rn.18909 |
| 141 | 78719 | U13396_g_at | NM_031514 | 24514 | Janus kinase 2 | Rn.18909 |
| 142 | 77648 | AJ001290cds_at | NM_053715 | 114507 | solute carrier family 5 (inositol transporters), member 3 | Rn.79242 |
| 143 | 77649 | AJ001517cds_at | NM_053301 | 29199 | hemochromatosis | Rn.42931 |
| 144 | 77651 | AJ001637cds_at | NM_013004 | 25512 | phosphate regulating gene with homologies to endopeptidases on the X | Rn.37861 |
| | | | | | chromosome | |
| 145 | 76426 | AJ002942cds_at | AJ002942 | 24706 | retinoic acid receptor, beta | Rn.38896 |
| 146 | 77660 | AJ004858_at | NM_053349 | 84046 | SRY-box containing gene 11 | Rn.12111 |
| 147 | 77666 | AJ005394_at | NM_134452 | 85490 | collagen, type V, alpha 1 | Rn.117 |
| 147 | 83143 | rc_AA859757_g_at | NM_134452 | 85490 | collagen, type V, alpha 1 | Rn.117 |
| 148 | 77670 | AJ005984_at | NM_021842 | 60334 | endosulfine alpha | Rn.27154 |
| 149 | 76430 | AJ006070_at | AJ006070 | 84600 | recombination activating gene 1 | Rn.92344 |
| 150 | 77676 | AJ006519_at | NM_024154 | 79123 | amiloride-sensitive cation channel 2, neuronal | Rn.37385 |
| 151 | 77684 | AJ007291_at | NM_057143 | 117287 | fertility protein SP22 | Rn.30105 |
| 151 | 77685 | AJ007291_g_at | NM_057143 | 117287 | fertility protein SP22 | Rn.30105 |
| 152 | 77686 | AJ007422_s_at | NM_133567 | 171097 | centaurin, alpha 1 | Rn.10539 |
| 153 | 77690 | AJ007632_s_at | NM_145095 | 246325 | potassium voltage-gated channel, subfamily H, member 8 | Rn.30029 |
| 154 | 77699 | AJ011115_g_at | NM_021838 | 24600 | nitric oxide synthase 3, endothelial cell | Rn.44265 |
| 154 | 77700 | AJ011116_at | NM_021838 | 24600 | nitric oxide synthase 3, endothelial cell | Rn.44265 |
| 155 | 77704 | AJ011606_at | NM_053480 | 85242 | polymerase (DNA directed), alpha 2 | Rn.91557 |
| 156 | 77708 | AJ011656cds_s_at | NM_031700 | 65130 | claudin 3 | Rn.4513 |
| 156 | 81868 | M74067_at | NM_031700 | 65130 | claudin 3 | Rn.4513 |
| 157 | 77709 | AJ011811_at | AJ011811 | 65132 | claudin 7 | Rn.32259 |
| 158 | 77713 | AJ012603cds_at | NM_020306 | 57027 | a disintegrin and metalloproteinase domain 17 (tumor necrosis factor, alpha, | Rn.24102 |
| | | | | | converting enzyme) | |
| 158 | 77714 | AJ012603UTR#1_at | NM_020306 | 57027 | a disintegrin and metalloproteinase domain 17 (tumor necrosis factor, alpha, | Rn.24102 |
| | | | | | converting enzyme) | |
| 158 | 77715 | AJ012603UTR#1_g_at | NM_020306 | 57027 | a disintegrin and metalloproteinase domain 17 (tumor necrosis factor, alpha, | Rn.24102 |
| | | | | | converting enzyme) | |
| 159 | 76433 | AJ223083_at | AJ223083 | 83574 | retinoid X receptor gamma | Rn.40816 |
| 160 | 77725 | AJ223355_at | NM_133418 | 170943 | solute carrier family 25 (mitochondrial carrier; dicarboxylate transporter), | Rn.3631 |
| | | | | | member 10 | |
| 161 | 76815 | AJ224120_at | NM_053487 | 85249 | peroxisomal biogenesis factor 11A | Rn.14519 |
| 162 | 77728 | D00092_s_at | D00092 | 290937 | similar to Dihydrolipoamide acetyltransferase component of pyruvate | Rn.122656 |
| | | | | | dehydrogenase complex (E2) (PDC-E2) (70 kDa mitochondrial autoantigen of | |
| | | | | | primary biliary cirrhosis) (PBC) | |
| 163 | 76780 | D00569_at | NM_057197 | 117543 | 2,4-dienoyl CoA reductase 1, mitochondrial | Rn.2854 |
| 163 | 76781 | D00569_g_at | NM_057197 | 117543 | 2,4-dienoyl CoA reductase 1, mitochondrial | Rn.2854 |
| 164 | 79889 | D00634_at | NM_012701 | 24925 | adrenergic receptor, beta 1 | Rn.87064 |
| 165 | 76114 | rc_AI229440_s_at | NM_138877 | 25035 | diaphorase 1 | Rn.35994 |
| 165 | 77732 | D00636cds_s_at | NM_138877 | 25035 | diaphorase 1 | Rn.35994 |
| 166 | 76441 | D00688_s_at | D00688 | 29253 | monoamine oxidase A | Rn.16867 |
| 167 | 79598 | D00729_at | NM_017306 | 29740 | dodecenoyl-coenzyme A delta isomerase | Rn.80835 |
| 168 | 81799 | D00753_at | NM_031531 | 24795 | Serine protease inhibitor | Rn.128 |
| 169 | 77738 | D01046_at | NM_032617 | 79434 | RAB11B, member RAS oncogene family | Rn.3903 |
| 170 | 82782 | D10233_g_at | NM_031095 | 81759 | renin binding protein | Rn.11116 |
| 171 | 82255 | D10262_at | NM_017127 | 29194 | choline kinase alpha | Rn.10985 |
| 172 | 77749 | D10693_at | NM_031044 | 81676 | histamine N-methyltransferase | Rn.13145 |
| 173 | 77751 | D10699_g_at | NM_017237 | 29545 | ubiquitin carboxy-terminal hydrolase L1 | Rn.107213 |
| 174 | 77759 | D10755_s_at | NM_017283 | 29673 | proteasome (prosome, macropain) subunit, alpha type 6 | Rn.107278 |
| 175 | 77765 | D10853_at | D10853 | 117544 | phosphoribosyl pyrophosphate amidotransferase | Rn.18690 |
| 176 | 77769 | D10952_i_at | NM_053586 | 94194 | cytochrome c oxidase subunit Vb | Rn.6686 |
| 177 | 77771 | D11445exon#1-4_s_at | NM_030845 | 81503 | chemokine (C—X—C motif) ligand 1 | Rn.10907 |
| 178 | 77781 | D12771_s_at | NM_057102 | 25176 | solute carrier family 25 (mitochondrial carrier; adenine nucleotide translocator), | Rn.102263 |
| | | | | | member 5 | |
| 179 | 77785 | D12978cds_s_at | D12978 | 171068 | POU domain, class 2, transcription factor 1 | Rn.46306 |
| 180 | 77786 | D13120_s_at | NM_019383 | 56080 | ATP synthase, H+ transporting, mitochondrial F0 complex, subunit d | Rn.80 |
| 181 | 77787 | D13122_i_at | NM_012915 | 25392 | ATPase inhibitor | Rn.1658 |
| 182 | 77790 | D13124_s_at | NM_133556 | 171082 | ATP synthase, H+ transporting, mitochondrial F0 complex, subunit c (subunit | Rn.127811 |
| | | | | | 9), isoform 2 | |
| 183 | 77796 | D13309_s_at | NM_031563 | 29206 | nuclease sensitive element binding protein 1 | Rn.110976 |
| 184 | 82850 | D13376_at | NM_024349 | 24183 | adenylate kinase 1 | Rn.79537 |
| 185 | 77798 | D13417_g_at | NM_024360 | 29577 | hairy and enhancer of split 1 (Drosophila) | Rn.19727 |
| 186 | 82035 | D13518_at | NM_012764 | 25172 | GATA binding protein 1 | Rn.10024 |
| 187 | 77800 | D13556exon_at | D13556 | | | |
| 188 | 77801 | D13623_at | NM_001008280 | 287633 | similar to ribosome-binding protein p34 - rat (predicted) | Rn.2783 |
| 189 | 82985 | D13907_g_at | NM_022395 | 64198 | peptidase (mitochondrial processing) beta | Rn.841 |
| 190 | 77807 | D13927_at | NM_053327 | 79425 | chloride channel K1 | Rn.88871 |
| 190 | 77808 | D13927_g_at | NM_053327 | 79425 | chloride channel K1 | Rn.88871 |
| 191 | 77810 | D13962_g_at | NM_017102 | 25551 | solute carrier family 2 (facilitated glucose transporter), member 3 | Rn.95055 |
| 192 | 77811 | D13963_at | NM_022920 | 24419 | glutamate receptor, metabotropic 6 | Rn.44615 |
| 193 | 77816 | D13985_g_at | NM_031719 | 65160 | chloride channel, nucleotide-sensitive, 1A | Rn.4089 |
| 193 | 81481 | rc_AI169005_at | NM_031719 | 65160 | chloride channel, nucleotide-sensitive, 1A | Rn.4089 |
| 194 | 76448 | D14014_g_at | NM_171992 | 58919 | cyclin D1 | Rn.22279 |
| 195 | 77817 | D14029_at | NM_019236 | 29567 | hairy and enhancer of split 2 (Drosophila) | Rn.44655 |
| 196 | 77819 | D14048_g_at | NM_057139 | 117280 | heterogeneous nuclear ribonucleoprotein U | Rn.4328 |
| 197 | 82979 | D14076_at | NM_138538 | 171574 | testicular dynamin | Rn.11191 |
| 198 | 77828 | D14568_at | NM_017309 | 29748 | protein phospatase 3, regulatory subunit B, alpha isoform, type 1 | Rn.42903 |
| 199 | 82030 | D16302_at | NM_030861 | 81519 | Alpha-1,3-mannosyl-glycoprotein 2-beta-N-acetylglucosaminyltransferase | Rn.2712 |
| 200 | 77839 | D16443_at | NM_012704 | 24929 | prostaglandin E receptor 3 (subtype EP3) | Rn.10361 |
| 200 | 77840 | D16443_g_at | NM_012704 | 24929 | prostaglandin E receptor 3 (subtype EP3) | Rn.10361 |
| 201 | 77842 | D16817_g_at | NM_031040 | 81672 | glutamate receptor, metabotropic 7 | Rn.10409 |
| 202 | 82056 | D17614_at | NM_013053 | 25577 | tyrosine 3-monooxygenase/tryptophan 5-monooxygenase activation protein, | Rn.2502 |
| | | | | | theta polypeptide | |
| 203 | 76462 | D21799_g_at | NM_017284 | 29675 | proteasome (prosome, macropain) subunit, beta type 2 | Rn.1981 |
| 204 | 77855 | D21869_s_at | NM_031715 | 65152 | phosphofructokinase, muscle | Rn.11004 |
| 205 | 76463 | D25233UTR#1_at | D25233 | 24708 | retinoblastoma 1 | Rn.55115 |
| 206 | 77861 | D26111_s_at | NM_173103 | 79430 | chloride channel Kb | Rn.10339 |
| 207 | 77865 | D26393exon_s_at | D26393 | | | |
| 208 | 82419 | D26439_at | NM_017079 | 25109 | CD1d1 antigen | Rn.11120 |
| 209 | 77881 | D28111_g_at | NM_012720 | 25037 | myelin-associated oligodendrocytic basic protein | Rn.91185 |
| 210 | 77883 | D28512_at | NM_019122 | 25731 | synaptotagmin 3 | Rn.48884 |
| 211 | 76467 | D28754_s_at | NM_199501 | 362817 | cyclin dependent kinase 2 | Rn.104460 |
| 212 | 82751 | D29646_at | NM_013127 | 25668 | CD38 antigen | Rn.11414 |
| 213 | 82152 | D29683_at | NM_053596 | 94204 | endothelin converting enzyme 1 | Rn.7000 |
| 214 | 77893 | D29766cds#1_s_at | NM_012931 | 25414 | breast cancer anti-estrogen resistance 1 | Rn.40101 |
| 215 | 77896 | D30649mRNA_s_at | NM_019370 | 54410 | ectonucleotide pyrophosphatase/phosphodiesterase 3 | Rn.44 |
| 216 | 82555 | D30735_at | NM_013222 | 27100 | growth factor, erv1-like | Rn.11039 |
| 217 | 82531 | D37920_at | NM_017136 | 29230 | squalene epoxidase | Rn.33239 |
| 218 | 79730 | D37934_at | D37934 | | | |
| 219 | 77914 | D38036_at | D38036 | | | |
| 220 | 77916 | D38061exon_s_at | NM_057105 | 113992 | UDP glycosyltransferase 1 family, polypeptide A6 | Rn.26489 |
| 220 | 78466 | S56937_s_at | NM_057105 | 113992 | UDP glycosyltransferase 1 family, polypeptide A6 | Rn.26489 |
| 221 | 77918 | D38063exon_at | NM_175846 | 301595 | UDP glycosyltransferase 1 family, polypeptide A8 | Rn.26489 |
| 222 | 77921 | D38067exon_at | D38067 | | | |
| 223 | 82871 | D38468_s_at | NM_013016 | 25528 | protein tyrosine phosphatase, non-receptor type substrate 1 | Rn.53971 |
| 224 | 77926 | D38494_at | NM_017292 | 29695 | gamma-aminobutyric acid A receptor, rho 2 | Rn.48659 |
| 225 | 77929 | D42116_s_at | NM_001005330 | 54243 | complement receptor related protein | Rn.5825 |
| 225 | 82202 | L36532_s_at | NM_001005330 | 54243 | complement receptor related protein | Rn.5825 |
| 226 | 77931 | D42148_at | NM_057100 | 58935 | growth arrest specific 6 | Rn.52228 |
| 227 | 77938 | D45247_at | D45247 | 29425 | proteasome (prosome, macropain) subunit, beta type 5 | Rn.2 |
| 227 | 77939 | D45247_g_at | D45247 | 29425 | proteasome (prosome, macropain) subunit, beta type 5 | Rn.2 |
| 228 | 77945 | D45254_g_at | NM_022598 | 64530 | cellular nucleic acid binding protein 1 | Rn.6187 |
| 229 | 79794 | D45413_at | D45413 | 171125 | protein tyrosine phosphatase, receptor type, H | Rn.10285 |
| 230 | 77948 | D45862_g_at | NM_013076 | 25608 | leptin | Rn.44444 |
| 231 | 82654 | D49434_at | D49434 | 25227 | arylsulfatase B | Rn.94004 |
| 232 | 80069 | D50093_s_at | NM_012631 | 24686 | prion protein | Rn.3936 |
| 233 | 81357 | rc_AI044488_at | NM_017126 | 29189 | ferredoxin 1 | Rn.6946 |
| 233 | 82653 | D50436_at | NM_017126 | 29189 | ferredoxin 1 | Rn.6946 |
| 234 | 82514 | D50694_at | NM_033236 | 25581 | proteasome (prosome, macropain) 26S subunit, ATPase 2 | Rn.1202 |
| 235 | 82516 | D50695_at | NM_057122 | 117262 | proteasome (prosome, macropain) 26S subunit, ATPase 4 | Rn.11341 |
| 236 | 82515 | D50696_at | NM_057123 | 117263 | peptidase (prosome, macropain) 26S subunit, ATPase 1 | Rn.10526 |
| 237 | 76786 | D63673_at | NM_057125 | 117265 | peroxisomal biogenesis factor 6 | Rn.10675 |
| 238 | 76837 | D63761_g_at | NM_024153 | 79122 | ferredoxin reductase | Rn.10860 |
| 239 | 82703 | D63772_at | NM_013032 | 25550 | solute carrier family 1 (neuronal/epithelial high affinity glutamate transporter, | Rn.6384 |
| | | | | | system Xag), member 1 | |
| 240 | 80296 | D64046_g_at | NM_022185 | 29741 | phosphatidylinositol 3-kinase, regulatory subunit, polypeptide 2 | Rn.22497 |
| 241 | 82225 | D64050_at | NM_053594 | 94202 | protein tyrosine phosphatase, receptor type, R | Rn.6277 |
| 242 | 77970 | D64085_g_at | NM_022211 | 60662 | fibroblast growth factor 5 | Rn.44445 |
| 243 | 80129 | D82868_at | NM_019326 | 54276 | neurogenic differentiation 2 | Rn.10724 |
| 244 | 82508 | D83349_at | NM_019161 | 29182 | cadherin 22 | Rn.108785 |
| 245 | 79979 | D83598_at | NM_013040 | 25560 | ATP-binding cassette, sub-family C (CFTR/MRP), member 9 | Rn.10528 |
| 246 | 77984 | D84485_at | D84485 | 362600 | ADP-ribosylhydrolase like 2 (predicted) | Rn.1834 |
| 247 | 82892 | D85189_at | NM_053623 | 113976 | acyl-CoA synthetase long-chain family member 4 | Rn.87821 |
| 248 | 77988 | D85435_at | NM_134449 | 85332 | protein kinase C, delta binding protein | Rn.12281 |
| 248 | 77989 | D85435_g_at | NM_134449 | 85332 | protein kinase C, delta binding protein | Rn.12281 |
| 249 | 76759 | D86215_at | NM_012985 | 25488 | NADH dehydrogenase (ubiquinone) 1 alpha subcomplex 5 | Rn.100240 |
| 250 | 82830 | D86711_at | D86711 | 362156 | similar to mKIAA1748 protein | Rn.4240 |
| 251 | 77993 | D86745cds_s_at | NM_057133 | 117274 | nuclear receptor subfamily 0, group B, member 2 | Rn.10712 |
| 252 | 82643 | D87515_at | NM_031097 | 81761 | arginyl aminopeptidase (aminopeptidase B) | Rn.10979 |
| 253 | 80119 | D87748_at | NM_017179 | 29375 | Unc4.1 homeobox (C. elegans) | Rn.10710 |
| 254 | 77996 | D87922exon_at | D87922 | | | |
| 255 | 77997 | D87991_at | NM_199081 | 287642 | galactose transporter | Rn.124916 |
| 255 | 77998 | D87991_g_at | NM_199081 | 287642 | galactose transporter | Rn.124916 |
| 256 | 82666 | D88666_at | NM_138882 | 85311 | phosphatidylserine-specific phospholipase A1 | Rn.10696 |
| 257 | 80060 | D88751_at | NM_013100 | 25637 | prostaglandin E receptor 1 | Rn.11423 |
| 258 | 76489 | D89069_f_at | NM_019170 | 29224 | carbonyl reductase 1 | Rn.3425 |
| 258 | 82598 | X95986mRNA#1_f_at | NM_019170 | 29224 | carbonyl reductase 1 | Rn.3425 |
| 259 | 76490 | D89070cds_s_at | D89070 | | | |
| 260 | 82923 | D89983_at | NM_022585 | 58961 | ornithine decarboxylase antizyme inhibitor | Rn.6290 |
| 261 | 81175 | rc_AA946532_at | NM_012804 | 25270 | ATP-binding cassette, sub-family D (ALD), member 3 | Rn.7024 |
| 261 | 82757 | D90038_at | NM_012804 | 25270 | ATP-binding cassette, sub-family D (ALD), member 3 | Rn.7024 |
| 262 | 78004 | D90258_s_at | NM_017280 | 29670 | proteasome (prosome, macropain) subunit, alpha type 3 | Rn.3997 |
| 263 | 78005 | D90265_s_at | NM_017278 | 29668 | proteasome (prosome, macropain) subunit, alpha type 1 | Rn.2668 |
| 264 | 78009 | D90404_g_at | NM_017097 | 25423 | cathepsin C | Rn.122504 |
| 265 | 79398 | E00988mRNA_s_at | NM_031511 | 24483 | insulin-like growth factor 2 | Rn.118681 |
| 266 | 76108 | rc_AI137856_s_at | NM_031576 | 29441 | P450 (cytochrome) oxidoreductase | Rn.11359 |
| 266 | 76549 | M10068mRNA_s_at | NM_031576 | 29441 | P450 (cytochrome) oxidoreductase | Rn.11359 |
| 266 | 79394 | E01524cds_s_at | NM_031576 | 29441 | P450 (cytochrome) oxidoreductase | Rn.11359 |
| 267 | 79390 | E01884cds_s_at | NM_031512 | 24494 | interleukin 1 beta | Rn.9869 |
| 268 | 79388 | E02223cds_f_at | NM_012548 | 24323 | endothelin 1 | Rn.10918 |
| 269 | 76498 | E03344cds_s_at | NM_017234 | 29534 | peroxisomal membrane protein 3 | Rn.4065 |
| 270 | 79380 | E03424cds_s_at | NM_024356 | 29244 | GTP cyclohydrolase 1 | Rn.28195 |
| 271 | 79366 | E12275cds_s_at | NM_031049 | 81681 | lanosterol synthase | Rn.10211 |
| 272 | 79363 | E12625cds_at | NM_080886 | 140910 | sterol-C4-methyl oxidase-like | Rn.7167 |
| 273 | 79358 | E13541cds_s_at | NM_019284 | 50568 | chondroitin sulfate proteoglycan 5 | Rn.10146 |
| 274 | 79356 | E13573cds_s_at | NM_057130 | 117271 | BH3 interacting (with BCL2 family) domain, apoptosis agonist | Rn.89639 |
| 275 | 79354 | E13732cds_at | NM_020542 | 57301 | macrophage inflammatory protein-1 alpha receptor gene | Rn.34673 |
| 276 | 76501 | J00728cds_f_at | J00728 | | | |
| 277 | 78012 | J00735_g_at | NM_012559 | 24367 | fibrinogen, gamma polypeptide | Rn.1702 |
| 277 | 78973 | X05861exon#1-6_s_at | NM_012559 | 24367 | fibrinogen, gamma polypeptide | Rn.1702 |
| 278 | 78017 | J00776cds_s_at | NM_207593 | 293731 | prostatic steroid-binding protein C2 | Rn.10394 |
| 279 | 78025 | J02596cds_g_at | NM_012501 | 24207 | apolipoprotein C-III | Rn.36813 |
| 280 | 79531 | J02675_at | NM_013024 | 25540 | spermine binding protein | Rn.9914 |
| 281 | 76104 | J02679_s_at | NM_017000 | 24314 | NAD(P)H dehydrogenase, quinone 1 | Rn.11234 |
| 282 | 82783 | J02962_at | NM_031832 | 83781 | lectin, galactose binding, soluble 3 | Rn.764 |
| 283 | 78027 | J02998_at | NM_031090 | 81754 | RAB1, member RAS oncogene family | Rn.106743 |
| 284 | 78998 | X08056cds_s_at | NM_012793 | 25257 | guanidinoacetate methyltransferase | Rn.33890 |
| 284 | 83017 | J03588_at | NM_012793 | 25257 | guanidinoacetate methyltransferase | Rn.33890 |
| 285 | 82029 | J03819_at | NM_012672 | 24831 | thyroid hormone receptor beta | Rn.88692 |
| 286 | 82766 | J04024_at | NM_017290 | 29693 | ATPase, Ca++ transporting, cardiac muscle, slow twitch 2 | Rn.2305 |
| 287 | 82122 | J04197_i_at | NM_012621 | 24638 | 6-phosphofructo-2-kinase/fructose-2,6-biphosphatase 1 | Rn.10115 |
| 288 | 79491 | J04503_at | NM_017038 | 24666 | protein phosphatase 1A, magnesium dependent, alpha isoform | Rn.37403 |
| 289 | 81903 | J04532_at | NM_022507 | 25522 | protein kinase C, zeta | Rn.1109 |
| 290 | 78277 | M25350_s_at | NM_017031 | 24626 | phosphodiesterase 4B | Rn.37733 |
| 290 | 82065 | J04563_at | NM_017031 | 24626 | phosphodiesterase 4B | Rn.37733 |
| 290 | 84558 | rc_AA799729_at | NM_017031 | 24626 | phosphodiesterase 4B | Rn.37733 |
| 290 | 84559 | rc_AA799729_g_at | NM_017031 | 24626 | phosphodiesterase 4B | Rn.37733 |
| 291 | 82978 | J04591_at | NM_012789 | 25253 | dipeptidylpeptidase 4 | Rn.91364 |
| 292 | 80223 | J04731_at | NM_012970 | 25468 | potassium voltage-gated channel, shaker-related subfamily, member 2 | Rn.10298 |
| 293 | 82069 | J04792 at | NM_012615 | 24609 | ornithine decarboxylase 1 | Rn.874 |
| 294 | 78032 | J04807mRNA_i_at | NM_019130 | 24506 | insulin 2 | Rn.989 |
| 295 | 82769 | J04943_at | NM_012992 | 25498 | nucleophosmin 1 | Rn.54537 |
| 296 | 76874 | J05181_at | NM_012815 | 25283 | glutamate-cysteine ligase, catalytic subunit | Rn.8365 |
| 297 | 76521 | J05425cds_s_at | NM_017202 | 29445 | cytochrome c oxidase subunit IV isoform 1 | Rn.2528 |
| 298 | 79529 | J05571_s_at | NM_134351 | 171347 | methionine adenosyltransferase II, alpha | Rn.41420 |
| 299 | 81901 | J05592_at | NM_022676 | 58977 | protein phosphatase 1, regulatory (inhibitor) subunit 1A | Rn.9756 |
| 299 | 81902 | J05592_g_at | NM_022676 | 58977 | protein phosphatase 1, regulatory (inhibitor) subunit 1A | Rn.9756 |
| 300 | 81324 | rc_AI013194_at | NM_020075 | 56783 | eukaryotic translation initiation factor 5 | Rn.40123 |
| 300 | 81643 | rc_AI177986_at | NM_020075 | 56783 | eukaryotic translation initiation factor 5 | Rn.40123 |
| 300 | 81949 | K01677_at | NM_020075 | 56783 | eukaryotic translation initiation factor 5 | Rn.40123 |
| 301 | 80428 | K01933_at | NM_012582 | 24464 | haptoglobin | Rn.10950 |
| 302 | 81866 | K02816_g_at | NM_001009618 | 192269 | RNA polymerase II transcriptional coactivator | Rn.8706 |
| 303 | 81837 | K03242_at | NM_017027 | 24564 | myelin protein zero | Rn.8997 |
| 304 | 78051 | K03468_s_at | NM_012604 | 24583 | myosin, heavy polypeptide 3, skeletal muscle, embryonic | Rn.98847 |
| 305 | 79785 | L00124_at | NM_012553 | 24332 | elastase 2 | Rn.10272 |
| 306 | 78053 | L00131cds_s_at | NM_012729 | 25052 | protease, serine, 2 | Rn.1584 |
| 307 | 79481 | L01507_at | NM_013008 | 25517 | POU domain, class 1, transcription factor 1 | Rn.10445 |
| 308 | 81912 | L01702_at | NM_012763 | 25167 | protein tyrosine phosphatase, receptor type, A | Rn.18043 |
| 309 | 78057 | L01793_at | NM_031043 | 81675 | glycogenin 1 | Rn.3661 |
| 309 | 82733 | U96130_at | NM_031043 | 81675 | glycogenin 1 | Rn.3661 |
| 310 | 80221 | L02315_at | L02315 | 58942 | calcium channel, voltage-dependent, beta 4 subunit | Rn.9863 |
| 311 | 82997 | L02529_at | NM_021266 | 58868 | frizzled homolog 1 (Drosophila) | Rn.6575 |
| 312 | 76530 | L02926_s_at | NM_012854 | 25325 | interleukin 10 | Rn.9868 |
| 312 | 79984 | X60675_at | NM_012854 | 25325 | interleukin 10 | Rn.9868 |
| 313 | 76623 | L03294_at | NM_012598 | 24539 | lipoprotein lipase | Rn.3834 |
| 313 | 81788 | rc_AI237731_s_at | NM_012598 | 24539 | lipoprotein lipase | Rn.3834 |
| 314 | 81888 | L03382_at | NM_022707 | 64672 | phospholamban | Rn.9740 |
| 315 | 82146 | L05489_at | NM_012945 | 25433 | diphtheria toxin receptor | Rn.10148 |
| 316 | 79422 | L06804_at | L06804 | 296706 | LIM homeobox protein 2 (predicted) | Rn.81063 |
| 317 | 82020 | L07073_at | NM_133593 | 171126 | adaptor-related protein complex 3, mu 1 subunit | Rn.10959 |
| 318 | 82021 | L07074_at | NM_133305 | 140667 | adaptor-related protein complex 3, mu 2 subunit | Rn.11007 |
| 319 | 78074 | L07380_g_at | NM_012850 | 25321 | growth hormone releasing hormone recepor | Rn.10936 |
| 320 | 78080 | L07402_f_at | L07402 | | | Rn.119903 |
| 321 | 78082 | L07408_at | L07408 | | | Rn.117930 |
| 322 | 78084 | L07410_at | L07410 | | | Rn.117938 |
| 323 | 78085 | L07925_at | NM_019250 | 29622 | ral guanine nucleotide dissociation stimulator | Rn.40174 |
| 323 | 78086 | L07925_g_at | NM_019250 | 29622 | ral guanine nucleotide dissociation stimulator | Rn.40174 |
| 324 | 78087 | L08228exon#22_s_at | NM_017010 | 24408 | glutamate receptor, ionotropic, N-methyl D-aspartate 1 | Rn.9840 |
| 324 | 80281 | U11418_s_at | NM_017010 | 24408 | glutamate receptor, ionotropic, N-methyl D-aspartate 1 | Rn.9840 |
| 325 | 78093 | L08495cds_s_at | NM_021841 | 29708 | gamma-aminobutyric acid A receptor, alpha 6 | Rn.96305 |
| 326 | 78094 | L08496cds_s_at | NM_017289 | 29689 | gamma-aminobutyric acid A receptor, delta | Rn.10927 |
| 327 | 82058 | L11319_at | NM_031723 | 65166 | signal peptidase complex 18 kD | Rn.13070 |
| 328 | 79571 | L11694_at | NM_017033 | 24645 | phosphoglucomutase 1 | Rn.9970 |
| 328 | 84381 | rc_AA894296_at | NM_017033 | 24645 | phosphoglucomutase 1 | Rn.9970 |
| 329 | 82641 | L12025_at | NM_017076 | 25066 | poliovirus receptor | Rn.10677 |
| 330 | 82726 | L12383_at | NM_024151 | 79120 | ADP-ribosylation factor 4 | Rn.35935 |
| 331 | 78109 | L13039_s_at | NM_019905 | 56611 | annexin A2 | Rn.90546 |
| 332 | 78122 | L13407_i_at | NM_012519 | 24246 | calcium/calmodulin-dependent protein kinase II, delta | Rn.87208 |
| 333 | 78124 | L13619_at | NM_022392 | 64194 | insulin induced gene 1 | Rn.772 |
| 334 | 78129 | L14003UTR#1_f_at | NM_012723 | 25046 | polymeric immunoglobulin receptor | Rn.54456 |
| 335 | 78133 | L14462_at | NM_019220 | 29466 | amino-terminal enhancer of split | Rn.11495 |
| 336 | 78136 | L14937cds#1_s_at | NM_133559 | 171085 | proprotein convertase subtilisin/kexin type 4 | Rn.2899 |
| 336 | 78137 | L14937cds#2_s_at | NM_133559 | 171085 | proprotein convertase subtilisin/kexin type 4 | Rn.2899 |
| 337 | 81165 | rc_AA946044_s_at | NM_030857 | 81515 | Yamaguchi sarcoma viral (v-yes-1) oncogene homolog | Rn.4338 |
| 337 | 81831 | L14951_at | NM_030857 | 81515 | Yamaguchi sarcoma viral (v-yes-1) oncogene homolog | Rn.4338 |
| 338 | 82053 | L16532_at | NM_012809 | 25275 | cyclic nucleotide phosphodiesterase 1 | Rn.31762 |
| 339 | 79985 | L17138_at | NM_017265 | 29632 | hydroxy-delta-5-steroid dehydrogenase, 3 beta- and steroid delta-isomerase 1 | Rn.109394 |
| 340 | 76217 | rc_AA893328_at | NM_172008 | 29144 | calnexin | Rn.1762 |
| 340 | 76535 | L18889_at | NM_172008 | 29144 | calnexin | Rn.1762 |
| 341 | 81921 | L19698_at | NM_031093 | 81757 | v-ral simian leukemia viral oncogene homolog A (ras related) | Rn.100380 |
| 342 | 80288 | L20468_at | NM_138511 | 171517 | glypican 2 (cerebroglycan) | Rn.88131 |
| 343 | 76875 | M32167_at | NM_031836 | 83785 | vascular endothelial growth factor A | Rn.1923 |
| 343 | 78149 | L20913_s_at | NM_031836 | 83785 | vascular endothelial growth factor A | Rn.1923 |
| 344 | 82209 | L22760_at | NM_019185 | 29300 | GATA binding protein 6 | Rn.8701 |
| 344 | 84783 | rc_AA800786_at | NM_019185 | 29300 | GATA binding protein 6 | Rn.8701 |
| 345 | 81900 | L22761_at | NM_144730 | 54254 | GATA binding protein 4 | Rn.26251 |
| 346 | 81867 | L24051_at | NM_053820 | 116543 | early B-cell factor 1 | Rn.11257 |
| 347 | 79745 | L24389_at | L24389 | | | |
| 348 | 79563 | L24776_at | NM_057208 | 117557 | tropomyosin 3, gamma | Rn.37575 |
| 349 | 76634 | L24896_s_at | NM_017165 | 29328 | glutathione peroxidase 4 | Rn.3647 |
| 350 | 79650 | L24897_s_at | L24897 | 29605 | myosin, heavy polypeptide 13, skeletal muscle | Rn.97830 |
| 351 | 82256 | L24907_at | NM_134468 | 171503 | calcium/calmodulin-dependent protein kinase I | Rn.11018 |
| 352 | 82405 | L25785_at | L25785 | 25564 | transforming growth factor beta 1 induced transcript 4 | Rn.3545 |
| 353 | 79890 | L26293_at | L26293 | | | Rn.114012 |
| 354 | 79592 | L27075_at | NM_016987 | 24159 | ATP citrate lyase | Rn.29771 |
| 355 | 80226 | L27663_at | L27663 | 29588 | POU domain, class 3, transcription factor 2 | Rn.82733 |
| 356 | 82033 | L29281_at | NM_019335 | 54287 | Protein kinase, interferon-inducible double stranded RNA dependent | Rn.10022 |
| 357 | 78173 | L29573_s_at | NM_031343 | 83511 | solute carrier family 6 (neurotransmitter transporter, noradrenalin), member 2 | Rn.14577 |
| 358 | 81857 | L31619_g_at | NM_012832 | 25302 | cholinergic receptor, nicotinic, alpha polypeptide 7 | Rn.9698 |
| 359 | 78177 | L31622_at | NM_019297 | 54239 | cholinergic receptor, nicotinic, beta polypeptide 2 (neuronal) | Rn.53978 |
| 360 | 76093 | rc_AI070295_at | NM_024127 | 25112 | growth arrest and DNA-damage-inducible 45 alpha | Rn.10250 |
| 360 | 76094 | rc_AI070295_g_at | NM_024127 | 25112 | growth arrest and DNA-damage-inducible 45 alpha | Rn.10250 |
| 360 | 76542 | L32591mRNA_g_at | NM_024127 | 25112 | growth arrest and DNA-damage-inducible 45 alpha | Rn.10250 |
| 361 | 78178 | L34074cds_at | NM_021860 | 60451 | olfactory receptor 1654 (predicted) | |
| 362 | 82025 | L34262_at | NM_022502 | 29411 | palmitoyl-protein thioesterase | Rn.1574 |
| 363 | 78179 | L34542cds_at | NM_021859 | 60450 | megakaryocyte-associated tyrosine kinase | Rn.44303 |
| 364 | 79631 | L36029_at | NM_024380 | 79222 | guanylyl cyclase 2e | Rn.10060 |
| 365 | 79632 | L36030_at | NM_053831 | 116556 | guanylate cyclase 2f | Rn.10061 |
| 366 | 78181 | L36664_s_at | NM_012544 | 24310 | angiotensin 1 converting enzyme | Rn.10149 |
| 367 | 76686 | L38437_at | NM_019223 | 29478 | NADH dehydrogenase (ubiquinone) Fe—S protein 6 | Rn.127777 |
| 368 | 82063 | L39991_at | L39991 | 81738 | nucleoporin 98 | Rn.11324 |
| 369 | 78187 | L41684mRNA_at | NM_031819 | 83720 | fat tumor suppressor homolog (Drosophila) | Rn.8633 |
| 370 | 78193 | L47281_at | L47281 | 116559 | collagen, type IV, alpha 3 | Rn.121139 |
| 371 | 76548 | L48209_s_at | L48209 | 171335 | cytochrome c oxidase, subunit VIIIa | Rn.2270 |
| 372 | 79441 | M10094_g_at | NM_001008830 | 309627 | RT1 class I, A3 | Rn.128901 |
| 373 | 81871 | M11266_at | NM_013078 | 25611 | ornithine transcarbamylase | Rn.2391 |
| 374 | 76552 | M11942_s_at | NM_024351 | 24468 | heat shock protein 8 | Rn.120392 |
| 375 | 83025 | M12156_at | NM_017248 | 29578 | heterogeneous nuclear ribonucleoprotein A1 | Rn.25771 |
| 375 | 84619 | rc_AA799893_g_at | NM_017248 | 29578 | heterogeneous nuclear ribonucleoprotein A1 | Rn.25771 |
| 376 | 78205 | M12335expandedCDS_s_at | M12335 | | | |
| 377 | 80420 | M12579_at | NM_012767 | 25194 | gonadotropin-releasing hormone 1 | Rn.59459 |
| 378 | 81895 | M13750_at | NM_017036 | 24656 | prolactin-like protein A | Rn.11230 |
| 379 | 83014 | M13979_at | NM_138827 | 24778 | solute carrier family 2 (facilitated glucose transporter), member 1 | Rn.3205 |
| 380 | 81869 | M14656_at | NM_012881 | 25353 | secreted phosphoprotein 1 | Rn.8871 |
| 381 | 76117 | rc_AA945573_f_at | NM_017158 | 29298 | cytochrome P450, family 2, subfamily c, polypeptide 7 | Rn.1247 |
| 381 | 78216 | M14775_s_at | NM_017158 | 29298 | cytochrome P450, family 2, subfamily c, polypeptide 7 | Rn.1247 |
| 382 | 82685 | M15327_at | NM_019286 | 24172 | alcohol dehydrogenase 1 | Rn.40222 |
| 383 | 80435 | M15481_g_at | NM_178866 | 24482 | insulin-like growth factor 1 | Rn.6282 |
| 384 | 78224 | M15528mRNA_at | M15528 | | | Rn.37410 |
| 385 | 80267 | M15882_at | NM_031974 | 83800 | clathrin, light polypeptide (Lca) | Rn.112599 |
| 386 | 78226 | M16406cds_s_at | NM_080773 | 25229 | cholinergic receptor, muscarinic 1 | |
| 387 | 80086 | M16409_at | M16409 | 25111 | cholinergic receptor, muscarinic 4 | Rn.10676 |
| 388 | 79464 | M16410_at | NM_019162 | 29191 | tachykinin 2 | Rn.9708 |
| 389 | 78228 | M17523mRNA_at | M17523 | | | |
| 390 | 76560 | M19533mRNA_i_at | NM_017101 | 25518 | peptidylprolyl isomerase A | Rn.1463 |
| 391 | 78244 | M19648cds_f_at | NM_001005382 | 292855 | glandular kallikrein 12, submandibular/renal | |
| 391 | 78259 | M22922cds_f_at | NM_001005382 | 292855 | glandular kallikrein 12, submandibular/renal | |
| 392 | 82995 | M19651_at | NM_012953 | 25445 | fos-like antigen 1 | Rn.11306 |
| 393 | 78248 | M20722_s_at | M20722 | 287750 | proline-rich protein | Rn.81196 |
| 394 | 78249 | M20724_s_at | M20724 | 287750 | proline-rich protein | Rn.81196 |
| 395 | 78252 | M21770_at | NM_012503 | 24210 | asialoglycoprotein receptor 1 | Rn.44300 |
| 396 | 79690 | M22253_at | NM_030875 | 81574 | sodium channel, voltage-gated, type 1, alpha polypeptide | Rn.32079 |
| 397 | 78261 | M22993cds_s_at | NM_023103 | 65279 | Murinoglobulin 1 homolog (mouse) | Rn.109457 |
| 398 | 78262 | M23566exon_s_at | NM_012488 | 24153 | alpha-2-macroglobulin | Rn.780 |
| 399 | 79040 | X16044cds_s_at | NM_017040 | 24673 | protein phosphatase 2a, catalytic subunit, beta isoform | Rn.977 |
| 399 | 81898 | M23591mRNA#2_at | NM_017040 | 24673 | protein phosphatase 2a, catalytic subunit, beta isoform | Rn.977 |
| 400 | 78263 | M23643cds_s_at | NM_013046 | 25569 | thyrotropin releasing hormone | Rn.22 |
| 400 | 78307 | M36317_s_at | NM_013046 | 25569 | thyrotropin releasing hormone | Rn.22 |
| 401 | 81881 | M23697_at | NM_013151 | 25692 | plasminogen activator, tissue | Rn.107102 |
| 402 | 82017 | M24067_at | NM_012620 | 24617 | serine (or cysteine) proteinase inhibitor, clade E, member 1 | Rn.29367 |
| 403 | 76565 | M24239cds#2_f_at | M24239 | | | |
| 404 | 81820 | M25073_at | NM_031012 | 81641 | alanyl (membrane) aminopeptidase | Rn.11132 |
| 405 | 78276 | M25348_s_at | NM_013101 | 25638 | phosphodiesterase 4A | Rn.91357 |
| 406 | 79667 | M25804_g_at | NM_145775 | 252917 | nuclear receptor subfamily 1, group D, member 1 | Rn.29848 |
| 407 | 78279 | M25823_s_at | NM_138507 | 24699 | protein tyrosine phosphatase, receptor type, C | Rn.90166 |
| 408 | 76660 | M26125_at | NM_012844 | 25315 | epoxide hydrolase 1 | Rn.3603 |
| 409 | 76569 | M26127_s_at | NM_012541 | 24297 | cytochrome P450, family 1, subfamily a, polypeptide 2 | Rn.5563 |
| 410 | 78324 | M61211cds_s_at | NM_012978 | 25477 | luteinizing hormone/choriogonadotropin receptor | Rn.11216 |
| 410 | 79423 | M26199_s_at | NM_012978 | 25477 | luteinizing hormone/choriogonadotropin receptor | Rn.11216 |
| 410 | 81781 | rc_AI236945_s_at | NM_012978 | 25477 | luteinizing hormone/choriogonadotropin receptor | Rn.11216 |
| 411 | 79522 | M26534_f_at | M26534 | | | |
| 412 | 79457 | M26643_at | NM_013178 | 25722 | sodium channel, voltage-gated, type IV, alpha palypeptide | Rn.9700 |
| 413 | 82027 | M26686_at | M26686 | | | |
| 414 | 79451 | M27223_at | NM_019266 | 29710 | sodium channel, voltage-gated, type 8, alpha polypeptide | Rn.91216 |
| 415 | 78285 | M27434_s_at | NM_147214 | 259246 | alpha-2u globulin PGCL1 | Rn.86422 |
| 416 | 76685 | M27466_at | NM_019360 | 54322 | cytochrome c oxidase, subunit VIc | Rn.846 |
| 417 | 81803 | M29014_at | NM_017071 | 24954 | insulin receptor | Rn.9876 |
| 418 | 81965 | M29293_at | NM_031117 | 81781 | small nuclear ribonucleoprotein N | Rn.11169 |
| 419 | 81947 | M29358_at | NM_017160 | 29304 | ribosomal protein S6 | Rn.34341 |
| 420 | 81828 | M30689_at | NM_139257 | 246138 | lymphocyte antigen 6 complex, locus B | Rn.39703 |
| 421 | 78296 | M31229mRNA_s_at | NM_133285 | 201097 | H1 histone family, member 4 | Rn.37879 |
| 422 | 81826 | M32016_at | NM_017068 | 24944 | lysosomal membrane glycoprotein 2 | Rn.1722 |
| 423 | 79474 | M33025_s_at | NM_031975 | 83801 | parathymosin | Rn.3609 |
| 423 | 82271 | X16481_r_at | NM_031975 | 83801 | parathymosin | Rn.3609 |
| 424 | 81915 | M33962_g_at | NM_012637 | 24697 | protein tyrosine phosphatase, non-receptor type 1 | Rn.11317 |
| 425 | 81969 | M35270complete_seq_i_at | NM_030656 | 24792 | alanine-glyoxylate aminotransferase | Rn.9931 |
| 426 | 79525 | M35297_at | NM_153722 | 266762 | MAS-related GPR, member F | Rn.9848 |
| 427 | 78308 | M36418_s_at | NM_031608 | 50592 | glutamate receptor, ionotropic, AMPA1 (alpha 1) | Rn.29971 |
| 428 | 78312 | M36804_s_at | NM_001007597 | 25447 | follicle - stimulating hormone subunit beta | Rn.92303 |
| 429 | 78315 | M37568cds_at | M37568 | | | |
| 430 | 76583 | M38566mRNA_s_at | NM_178847 | 301517 | cytochrome P450, family 27, subfamily a, polypeptide 1 | Rn.94956 |
| 431 | 82043 | M38759_at | NM_017016 | 24443 | histidine decarboxylase | Rn.48653 |
| 432 | 78319 | M55015cds_s_at | NM_012749 | 25135 | nucleolin | Rn.127771 |
| 433 | 80414 | M57507_at | NM_012770 | 25206 | guanylate cyclase 1, soluble, beta 2 | Rn.10933 |
| 434 | 82839 | M57664_g_at | NM_012529 | 24264 | creatine kinase, brain | Rn.1472 |
| 435 | 79560 | M57705_g_at | NM_019353 | 54314 | thyroid peroxidase | Rn.91199 |
| 436 | 81907 | M58758_g_at | NM_031604 | 29757 | ATPase, H+ transporting, lysosomal V0 subunit a isoform 1 | Rn.6015 |
| 437 | 82095 | M59861_at | NM_022547 | 64392 | formyltetrahydrofolate dehydrogenase | Rn.2328 |
| 438 | 76805 | M60322_at | NM_012498 | 24192 | Aldehyde reductase 1 (low Km aldose reductase) (5.8 kb Pstl fragment, | Rn.107801 |
| | | | | | probably the functional gene) | |
| 439 | 82045 | M60655_at | NM_016991 | 24173 | adrenergic receptor, alpha 1b | Rn.10032 |
| 440 | 81141 | rc_AA944156_s_at | NM_017259 | 29619 | B-cell translocation gene 2, anti-proliferative | Rn.27923 |
| 440 | 82679 | M60921_at | NM_017259 | 29619 | B-cell translocation gene 2, anti-proliferative | Rn.27923 |
| 440 | 82680 | M60921_g_at | NM_017259 | 29619 | B-cell translocation gene 2, anti-proliferative | Rn.27923 |
| 441 | 78325 | M61725_s_at | M61725 | 25574 | upstream binding transcription factor, RNA polymerase I | Rn.22469 |
| 442 | 76661 | M61875_s_at | NM_012924 | 25406 | CD44 antigen | Rn.1120 |
| 443 | 76591 | M62388_at | NM_031138 | 81816 | ubiquitin conjugating enzyme | Rn.20766 |
| 444 | 81860 | M62891_at | NM_001010964 | 362443 | killer cell lectin-like receptor subfamily B member 1A | Rn.101826 |
| 445 | 81878 | M63006_at | NM_016989 | 24166 | adenylate cyclase activating polypeptide 1 | Rn.37400 |
| 446 | 76654 | M63122_at | NM_013091 | 25625 | tumor necrosis factor receptor superfamily, member 1a | Rn.11119 |
| 447 | 79660 | M64299_at | NM_017155 | 29290 | adenosine A1 receptor | Rn.32078 |
| 448 | 79622 | M64488_at | NM_012665 | 24805 | synaptotagmin 2 | Rn.88574 |
| 449 | 79518 | M64793_at | M64793 | | | |
| 450 | 79798 | M64795_i_at | M64795 | | | |
| 451 | 79431 | M64862_at | NM_022667 | 24546 | solute carrier organic anion transporter family, member 2a1 | Rn.9671 |
| 452 | 80431 | M64867_at | NM_017254 | 29595 | 5-hydroxytryptamine (serotonin) receptor 2A | Rn.127646 |
| 453 | 82760 | M64986_g_at | NM_012963 | 25459 | high mobility group box 1 | Rn.4121 |
| 454 | 79554 | M65253_at | NM_133514 | 117061 | matrix metallopeptidase 10 | Rn.9946 |
| 455 | 78964 | X02322Poly_A_Site#1_s_at | NM_031577 | 29446 | growth hormone releasing hormone | Rn.10693 |
| 455 | 83008 | M73486_at | NM_031577 | 29446 | growth hormone releasing hormone | Rn.10693 |
| 456 | 81833 | M73714_at | NM_031731 | 65183 | aldehyde dehydrogenase family 3, subfamily A2 | Rn.9113 |
| 457 | 79454 | M74494_g_at | NM_012504 | 24211 | ATPase, Na+/K+ transporting, alpha 1 polypeptide | Rn.2992 |
| 458 | 76598 | M74776_at | M74776 | | | |
| 459 | 81816 | M75148_at | M75148 | 171041 | kinesin 2 | Rn.106230 |
| 460 | 76602 | M76535cds_g_at | NM_019280 | 50563 | gap junction membrane channel protein alpha 5 | Rn.88300 |
| 461 | 76603 | M76704_s_at | NM_012861 | 25332 | O-6-methylguanine-DNA methyltransferase | Rn.9836 |
| 462 | 82775 | M77245_at | NM_017277 | 29663 | adaptor protein complex AP-1, beta 1 subunit | Rn.37383 |
| 463 | 82689 | M80550_at | NM_031007 | 81636 | adenylate cyclase 2 | Rn.10731 |
| 464 | 76605 | M80784_s_at | NM_017256 | 29610 | transforming growth factor, beta receptor 3 | Rn.9953 |
| 465 | 78354 | M81183Exon_UTR_g_at | M81183 | | | |
| 466 | 83033 | M81687_at | NM_013082 | 25615 | syndecan 2 | Rn.11127 |
| 467 | 76606 | M81766_at | NM_206849 | 361801 | retinoid X receptor beta | Rn.49295 |
| 468 | 82099 | M84210_at | NM_053997 | 117101 | potassium voltage gated channel, Shaw-related subfamily, member 3 | Rn.9885 |
| 469 | 80423 | M84361_at | NM_023981 | 78965 | colony stimulating factor 1 (macrophage) | Rn.83632 |
| 470 | 78367 | M86341_at | NM_183325 | 25371 | ADP-ribosylarginine hydrolase | Rn.13315 |
| 471 | 76283 | rc_AA998683_g_at | NM_031970 | 24471 | heat shock 27 kDa protein 1 | Rn.3841 |
| 471 | 76285 | rc_AI176658_s_at | NM_031970 | 24471 | heat shock 27 kDa protein 1 | Rn.3841 |
| 471 | 76607 | M86389cds_s_at | NM_031970 | 24471 | heat shock 27 kDa protein 1 | Rn.3841 |
| 472 | 79498 | M86514_at | M86514 | 287750 | proline-rich protein | Rn.81196 |
| 473 | 82762 | M86564_at | NM_021740 | 29222 | prothymosin alpha | Rn.817 |
| 474 | 76864 | M86758_at | NM_012883 | 25355 | sulfotransferase, estrogen preferring | Rn.32104 |
| 475 | 80222 | M87634_at | NM_012560 | 24370 | forkhead box G1 | Rn.9864 |
| 476 | 78372 | M87786_at | M87786 | | | Rn.117928 |
| 477 | 79425 | M88111_at | NM_053996 | 117100 | solute carrier family 6 (neurotransmitter transporter, L-proline) member 7 | Rn.9663 |
| 478 | 78375 | M88488exon_at | M88488 | | | |
| 479 | 78376 | M89646_at | NM_031112 | 81776 | ribosomal protein S24 | Rn.979 |
| 480 | 78382 | M89953cds_at | NM_012852 | 25323 | 5-hydroxytryptamine (serotonin) receptor 1D | Rn.34834 |
| 481 | 79424 | M91234_f_at | M91234 | | | |
| 482 | 82415 | M91466_at | NM_017161 | 29316 | adenosine A2B receptor | Rn.89544 |
| 483 | 78390 | M91595exon_s_at | NM_013122 | 25662 | insulin-like growth factor binding protein 2 | Rn.6813 |
| 484 | 81988 | M92074_at | NM_017144 | 29248 | troponin I, cardiac | Rn.64141 |
| 485 | 78397 | M93257_s_at | NM_012531 | 24267 | catechol-O-methyltransferase | Rn.220 |
| 486 | 81337 | rc_AI030089_at | NM_022869 | 64896 | nucleolar and coiled-body phosphoprotein 1 | Rn.9517 |
| 486 | 81862 | M94287_at | NM_022869 | 64896 | nucleolar and coiled-body phosphoprotein 1 | Rn.9517 |
| 487 | 76849 | M94548_at | NM_019623 | 56266 | cytochrome P450, family 4, subfamily F, polypeptide 2 | Rn.5722 |
| 488 | 78404 | M95791cds_f_at | M95791 | | | |
| 489 | 82552 | M96548_at | NM_052798 | 24522 | zinc finger protein 354A | Rn.11049 |
| 490 | 78410 | M98819mRNA_s_at | NM_138876 | 25028 | adenosine monophosphate deaminase 1 (isoform M) | Rn.9794 |
| 491 | 78411 | M98826mRNA_at | M98826 | | | |
| 492 | 78412 | M98826mRNA_g_at | NM_031573 | 29353 | phosphorylase kinase gamma 1 | Rn.10399 |
| 493 | 78414 | M99222_s_at | NM_012918 | 25398 | calcium channel, voltage-dependent, P/Q type, alpha 1A subunit | Rn.87769 |
| 494 | 83628 | rc_AA684919_at | AA684919 | | | Rn.14682 |
| 495 | 84403 | rc_AA799323_at | AA799323 | 364206 | pleckstrin (predicted) | Rn.6178 |
| 496 | 84404 | rc_AA799328_at | AA799328 | | | Rn.112856 |
| 497 | 84405 | rc_AA799330_at | NM_001007634 | 294754 | pelota homolog | Rn.3842 |
| 498 | 84416 | rc_AA799412_g_at | NM_001008511 | 293701 | estrogen related receptor, alpha | Rn.2190 |
| 499 | 84420 | rc_AA799427_at | AA799427 | 361194 | similar to RIKEN cDNA 1110018J18 (predicted) | Rn.24906 |
| 500 | 84426 | rc_AA799442_g_at | AA799442 | 293114 | hypothetical LOC293114 (predicted) | Rn.3826 |
| 501 | 84440 | rc_AA799471_at | AA799471 | | | Rn.128444 |
| 502 | 84445 | rc_AA799478_at | NM_022700 | 64664 | ADP-ribosylation factor-like 3 | Rn.9538 |
| 503 | 76270 | rc_AA799479_g_at | AA799479 | 293652 | NADH dehydrogenase (ubiquinone) Fe—S protein 8 (predicted) | Rn.3373 |
| 504 | 84446 | rc_AA799480_at | AA799480 | | | |
| 505 | 84450 | rc_AA799488_at | AA799488 | 316685 | similar to D330021B20 protein (predicted) | Rn.98546 |
| 506 | 84453 | rc_AA799495_at | AA799495 | | | Rn.61074 |
| 507 | 81065 | rc_AA799498_at | NM_031545 | 25105 | natriuretic peptide precursor type B | Rn.3835 |
| 508 | 84474 | rc_AA799534_at | AA799534 | | | Rn.94764 |
| 509 | 84482 | rc_AA799544_at | AA799544 | 313325 | ladinin (predicted) | |
| 510 | 84488 | rc_AA799554_at | AA799554 | | | Rn.6202 |
| 511 | 84491 | rc_AA799566_g_at | AA799566 | 171124 | incisor protein | Rn.128967 |
| 512 | 84521 | rc_AA799637_at | AA799637 | 309798 | LIM and senescent cell antigen-like domains 1 (predicted) | Rn.100399 |
| 513 | 84523 | rc_AA799641_at | NM_001008312 | 296350 | tumor differentially expressed 1 (predicted) | Rn.3775 |
| 513 | 84524 | rc_AA799641_g_at | NM_001008312 | 296350 | tumor differentially expressed 1 (predicted) | Rn.3775 |
| 514 | 84529 | rc_AA799656_at | AA799656 | 290850 | mitochondrial ribosomal protein S31 (predicted) | Rn.22173 |
| 514 | 84530 | rc_AA799656_g_at | AA799656 | 290850 | mitochondrial ribosomal protein S31 (predicted) | Rn.22173 |
| 515 | 84556 | rc_AA799724_g_at | AA799724 | 360762 | similar to RNA polymerase 1-3 | Rn.6228 |
| 516 | 84576 | rc_AA799766_at | AA799766 | 288480 | similar to Jtv1-pending protein | Rn.3333 |
| 517 | 84577 | rc_AA799771_at | AA799771 | | | Rn.17586 |
| 518 | 84578 | rc_AA799773_at | AA799773 | 362332 | filamin C, gamma (actin binding protein 280) (predicted) | Rn.22352 |
| 518 | 84579 | rc_AA799773_g_at | AA799773 | 362332 | filamin C, gamma (actin binding protein 280) (predicted) | Rn.22352 |
| 519 | 84585 | rc_AA799791_at | NM_184049 | 373542 | serine/threonine kinase 25 (STE20 homolog, yeast) | Rn.22352 |
| 520 | 84593 | rc_AA799812_at | AA799812 | | | Rn.22271 |
| 521 | 84603 | rc_AA799847_at | AA799847 | | | Rn.21429 |
| 522 | 84613 | rc_AA799887_s_at | NM_031331 | 83499 | proteasome (prosome, macropain) 26S subunit, non-ATPase, 4 | Rn.3830 |
| 523 | 84630 | rc_AA799992_g_at | AA799992 | 361624 | similar to C11orf17 protein (predicted) | Rn.106344 |
| 524 | 84638 | rc_AA800015_at | AA800015 | 293345 | TAF10 RNA polymerase II, TATA box binding protein (TBP)-associated factor | Rn.104887 |
| | | | | | (predicted) | |
| 525 | 84652 | rc_AA800053_at | NM_001007618 | 289508 | ring finger and CHY zinc finger domain containing 1 | Rn.2007 |
| 526 | 84663 | rc_AA800175_at | AA800175 | 298696 | protein (peptidyl-prolyl cis/trans isomerase) NIMA-interacting 1 (predicted) | Rn.6291 |
| 527 | 84685 | rc_AA800222_at | AA800222 | 361367 | autocrine motility factor receptor (predicted) | Rn.107561 |
| 528 | 84696 | rc_AA800272_at | AA800272 | 300974 | mitochondrial ribosomal protein L3 (predicted) | Rn.6950 |
| 529 | 76706 | U53922_at | NM_022934 | 65028 | DnaJ-like protein | Rn.64562 |
| 529 | 84719 | rc_AA800551_at | NM_022934 | 65028 | DnaJ-like protein | Rn.64562 |
| 530 | 84723 | rc_AA800572_at | AA800572 | 294981 | sprouty homolog 1 (Drosophila) (predicted) | Rn.22787 |
| 531 | 84738 | rc_AA800651_s_at | AA800651 | 312754 | protein phosphatase 2, regulatory subunit B (B56), alpha isoform (predicted) | Rn.104461 |
| 532 | 84740 | rc_AA800665_at | NM_023955 | 65168 | secretory carrier membrane protein 2 | Rn.3752 |
| 533 | 84745 | rc_AA800678_g_at | AA800678 | 363328 | similar to AW046014 protein | Rn.21528 |
| 534 | 84747 | rc_AA800680_at | AA800680 | 366002 | Notch-regulated ankyrin repeat protein (predicted) | Rn.22790 |
| 535 | 84749 | rc_AA800686_at | AA800686 | | | Rn.69085 |
| 536 | 84761 | rc_AA800719_at | AA800719 | | | Rn.98517 |
| 537 | 84773 | rc_AA800750_f_at | AA800750 | | | |
| 538 | 84782 | rc_AA800784_at | NM_031327 | 83476 | cysteine rich protein 61 | Rn.22129 |
| 539 | 84799 | rc_AA800849_f_at | AA800849 | | | |
| 540 | 84804 | rc_AA800853_at | NM_001002830 | 305302 | RAS-like family 11 member B | Rn.36357 |
| 541 | 84816 | rc_AA800912_g_at | NM_001001504 | 246770 | general transcription factor II I repeat domain-containing 1 | Rn.84872 |
| 542 | 81086 | rc_AA801286_at | NM_032057 | 83523 | Inositol (myo)-1(or 4)-monophosphatase 1 | Rn.3975 |
| 543 | 81489 | rc_AA817846_at | NM_053995 | 117099 | 3-hydroxybutyrate dehydrogenase (heart, mitochondrial) | Rn.36635 |
| 544 | 81490 | rc_AA817887_at | NM_022511 | 64303 | profilin 1 | Rn.1152 |
| 545 | 81511 | rc_AA818025_g_at | AA818025 | | | |
| 546 | 81524 | rc_AA818114_at | NM_017355 | 50866 | RAB4B, member RAS oncogene family | Rn.7181 |
| 547 | 81534 | rc_AA818144_at | NM_017096 | 25419 | C-reactive protein, petaxin related | Rn.16463 |
| 548 | 81600 | rc_AA818970_s_at | NM_017333 | 50672 | endothelin receptor type B | Rn.11412 |
| 549 | 81601 | rc_AA818982_at | NM_012887 | 25359 | thymopoietin | Rn.3364 |
| 549 | 81602 | rc_AA818982_g_at | NM_012887 | 25359 | thymopoietin | Rn.3364 |
| 550 | 81090 | rc_AA849036_at | NM_017090 | 25201 | guanylate cyclase 1, soluble, alpha 3 | Rn.1974 |
| 551 | 81092 | rc_AA849648_at | NM_053330 | 79449 | ribosomal protein L21 | Rn.83200 |
| 552 | 81098 | rc_AA850669_at | NM_053891 | 116671 | cyclin-dependent kinase 5, regulatory subunit 1 (p35) | Rn.11213 |
| 552 | 82494 | U50707_at | NM_053891 | 116671 | cyclin-dependent kinase 5, regulatory subunit 1 (p35) | Rn.11213 |
| 553 | 81100 | rc_AA850756_at | NM_012857 | 25328 | lysosomal membrane glycoprotein 1 | Rn.40177 |
| 554 | 76272 | rc_AA851403_at | AA851403 | 293991 | NADH dehydrogenase (ubiquinone) 1 beta subcomplex 8 (predicted) | Rn.3383 |
| 554 | 76273 | rc_AA851403_g_at | AA851403 | 293991 | NADH dehydrogenase (ubiquinone) 1 beta subcomplex 8 (predicted) | Rn.3383 |
| 555 | 81797 | rc_AA858520_at | NM_012561 | 24373 | follistatin | Rn.2743 |
| 556 | 83046 | rc_AA858586_at | AA858586 | | | |
| 557 | 83050 | rc_AA858600_at | AA858600 | 360745 | leucine-zipper-like transcriptional regulator, 1 (predicted) | Rn.15759 |
| 558 | 83052 | rc_AA858603_g_at | AA858603 | 362824 | similar to hypothetical protein MGC20700 (predicted) | Rn.93047 |
| 559 | 78660 | S82383_s_at | NM_173111 | 286890 | tropomyosin isoform 6 | Rn.37575 |
| 559 | 81795 | rc_AA859305_s_at | NM_173111 | 286890 | tropomyosin isoform 6 | Rn.37575 |
| 560 | 76323 | rc_AA859372_s_at | AA859372 | | | |
| 561 | 83066 | rc_AA859473_at | NM_053555 | 89818 | vesicle-associated membrane protein 5 | Rn.22616 |
| 562 | 83069 | rc_AA859483_at | AA859483 | | | Rn.45705 |
| 563 | 83082 | rc_AA859533_at | AA859533 | 309900 | tubby like protein 1 (predicted) | Rn.254 |
| 564 | 83094 | rc_AA859581_at | NM_138518 | 171547 | late gestation lung protein 1 | Rn.4346 |
| 565 | 83099 | rc_AA859597_at | AA859597 | | | Rn.118218 |
| 566 | 77049 | rc_AA859648_at | AA859648 | 361384 | DnaJ (Hsp40) homolog, subfamily B, member 1 (predicted) | Rn.7896 |
| 567 | 83115 | rc_AA859663_at | AA859663 | 301114 | similar to RIKEN cDNA 4933406J04 | Rn.41 |
| 568 | 83122 | rc_AA859680_at | AA859680 | 304649 | similar to CG2662-PA (predicted) | Rn.20 |
| 569 | 83134 | rc_AA859718_at | AA859718 | 361119 | similar to RIKEN cDNA A230063L24 gene | Rn.40562 |
| 570 | 83135 | rc_AA859719_at | AA859719 | 289143 | mitochondrial ribosomal protein S14 (predicted) | Rn.67 |
| 571 | 83138 | rc_AA859740_at | AA859740 | | | Rn.4264 |
| 572 | 83140 | rc_AA859750_at | AA859750 | | | Rn.7937 |
| 573 | 83144 | rc_AA859760_at | AA859760 | | | Rn.120041 |
| 574 | 83150 | rc_AA859804_at | AA859804 | 363275 | eukaryotic translation initiation factor 4E like 3 (predicted) | Rn.11732 |
| 575 | 83151 | rc_AA859805_at | NM_001012125 | 315714 | lysyl oxidase-like 1 (predicted) | Rn.770 |
| 576 | 83152 | rc_AA859806_at | NM_024161 | 79130 | cysteine string protein | Rn.100120 |
| 577 | 83154 | rc_AA859827_at | AA859827 | 171570 | uridine-cytidine kinase 2 | Rn.24811 |
| 578 | 81002 | rc_AA859830_s_at | NM_017087 | 25181 | biglycan | Rn.783 |
| 579 | 78820 | U57050_g_at | NM_031978 | 83806 | proteasome (prosome, macropain) 26S subunit, non-ATPase, 1 | Rn.2891 |
| 579 | 83165 | rc_AA859869_s_at | NM_031978 | 83806 | proteasome (prosome, macropain) 26S subunit, non-ATPase, 1 | Rn.2891 |
| 580 | 77050 | rc_AA900380_at | NM_130426 | 156767 | tumor necrosis factor receptor superfamily, member 1b | Rn.83633 |
| 580 | 83172 | rc_AA859889_at | NM_130426 | 156767 | tumor necrosis factor receptor superfamily, member 1b | Rn.96673 |
| 581 | 83185 | rc_AA859922_at | AA859922 | 305291 | similar to SRD5A2L (predicted) | Rn.819 |
| 582 | 83199 | rc_AA859954_at | NM_138839 | 192129 | vacuole Membrane Protein 1 | Rn.109048 |
| 583 | 83210 | rc_AA859983_at | AA859983 | 363216 | cyclin M4 (predicted) | Rn.857 |
| 584 | 83214 | rc_AA859994_at | AA859994 | | | Rn.40435 |
| 585 | 83215 | rc_AA859996_at | AA859996 | | | Rn.105661 |
| 586 | 83222 | rc_AA860024_at | AA860024 | 293725 | eukaryotic translation elongation factor 1 gamma | Rn.128130 |
| 587 | 81155 | rc_AA945321_at | NM_134326 | 24186 | albumin | Rn.34353 |
| 587 | 83234 | rc_AA860062_g_at | NM_134326 | 24186 | albumin | Rn.34353 |
| 587 | 83240 | rc_AA866237_s_at | NM_134326 | 24186 | albumin | Rn.34353 |
| 588 | 83235 | rc_AA866221_at | AA866221 | | | |
| 589 | 83250 | rc_AA866272_at | AA866272 | 311299 | apoptosis, caspase activation inhibitor (predicted) | Rn.24294 |
| 590 | 83265 | rc_AA866362_at | AA866362 | 308336 | zinc finger protein 580 (predicted) | Rn.6984 |
| 591 | 83274 | rc_AA866414_at | NM_012651 | 24779 | solute carrier family 4, member 1 | Rn.32202 |
| 592 | 83277 | rc_AA866426_at | AA866426 | | | Rn.3101 |
| 593 | 83281 | rc_AA866439_g_at | AA866439 | | | Rn.3109 |
| 594 | 83283 | rc_AA866444_s_at | AA866444 | 307787 | Rho GTPase activating protein 10 (predicted) | Rn.40465 |
| 595 | 83302 | rc_AA874803_g_at | AA874803 | | | Rn.3130 |
| 596 | 83305 | rc_AA874815_at | AA874815 | | | |
| 597 | 83308 | rc_AA874832_at | AA874832 | 288671 | anaphase-promoting complex subunit 5 (predicted) | Rn.101004 |
| 598 | 83322 | rc_AA874874_at | NM_017270 | 29646 | alcohol dehydrogenase 4 (class II), pi polypeptide | Rn.98159 |
| 599 | 83346 | rc_AA874952_at | AA874952 | 313598 | zinc finger protein 262 (predicted) | Rn.3185 |
| 600 | 83354 | rc_AA874995_at | NM_001007703 | 313771 | similar to BC002216 protein | Rn.3197 |
| 601 | 83355 | rc_AA874999_at | AA874999 | 298068 | Sec61 beta subunit (predicted) | Rn.103030 |
| 602 | 83357 | rc_AA875002_at | AA875002 | 311846 | leucine-rich repeat-containing 8 (predicted) | Rn.33512 |
| 603 | 83359 | rc_AA875010_at | NM_053589 | 94197 | RAB14, member RAS oncogene family | Rn.6008 |
| 604 | 83360 | rc_AA875017_at | AA875017 | | | |
| 605 | 83374 | rc_AA875042_at | AA875042 | 361774 | LOC361774 (predicted) | Rn.17036 |
| 606 | 83385 | rc_AA875089_at | NM_053295 | 25403 | calpastatin | Rn.17481 |
| 607 | 83388 | rc_AA875098_at | AA875098 | 300211 | FK506 binding protein 11 (predicted) | Rn.100569 |
| 608 | 83392 | rc_AA875121_at | NM_012866 | 25337 | nuclear transcription factor-Y gamma | Rn.1457 |
| 609 | 83397 | rc_AA875126_g_at | AA875126 | | | Rn.2799 |
| 610 | 83413 | rc_AA875165_at | AA875165 | 368168 | similar to Gamma-tubulin complex component 4 (GCP-4) (hGCP4) (h76p) | Rn.2813 |
| | | | | | (Hgrip76) | |
| 611 | 83415 | rc_AA875171_at | AA875171 | 287134 | N-acetylglucosamine-1-phosphotransferase, gamma subunit (predicted) | Rn.2814 |
| 611 | 83416 | rc_AA875171_g_at | AA875171 | 287134 | N-acetylglucosamine-1-phosphotransferase, gamma subunit (predicted) | Rn.2814 |
| 612 | 83418 | rc_AA875182_at | AA875182 | 361809 | zinc finger protein 523 (predicted) | Rn.13446 |
| 613 | 83423 | rc_AA875197_at | AA875197 | 300806 | similar to 3300001A09Rik protein (predicted) | Rn.102780 |
| 614 | 83424 | rc_AA875198_at | NM_001008386 | 493574 | notch1-induced protein | Rn.119606 |
| 615 | 83428 | rc_AA875205_g_at | AA875205 | 288516 | eukaryotic translation initiation factor 3, subunit 9 (eta) (predicted) | Rn.2829 |
| 616 | 83429 | rc_AA875206_at | NM_053747 | 114590 | ubiquilin 1 | Rn.94864 |
| 617 | 83443 | rc_AA875255_at | AA875255 | | | |
| 618 | 83446 | rc_AA875263_at | AA875263 | 300222 | microspherule protein 1 (predicted) | Rn.129193 |
| 619 | 83450 | rc_AA875275_at | AA875275 | | | Rn.35732 |
| 620 | 76248 | rc_AA875327_at | NM_001006957 | 288599 | eukaryotic translation initiation factor 4H | Rn.79423 |
| 621 | 83459 | rc_AA875348_at | AA875348 | | | |
| 622 | 83463 | rc_AA875405_at | NM_001012091 | 311547 | forkhead-like 18 (Drosophila) (predicted) | Rn.3227 |
| 623 | 83472 | rc_AA875428_at | AA875428 | 306587 | similar to RIKEN cDNA 9130410M22 | Rn.2916 |
| 624 | 83476 | rc_AA875444_at | AA875444 | 25416 | dihydropyrimidinase-like 2 | Rn.2889 |
| 625 | 83480 | rc_AA875468_at | AA875468 | | | Rn.18917 |
| 626 | 81401 | rc_AI070967_g_at | NM_012903 | 25379 | acidic (leucine-rich) nuclear phosphoprotein 32 family, member A | Rn.10123 |
| 626 | 83483 | rc_AA875495_at | NM_012903 | 25379 | acidic (leucine-rich) nuclear phosphoprotein 32 family, member A | Rn.10123 |
| 626 | 84218 | rc_AA893496_at | NM_012903 | 25379 | acidic (leucine-rich) nuclear phosphoprotein 32 family, member A | Rn.10123 |
| 627 | 83486 | rc_AA875506_at | NM_053824 | 116549 | casein kinase II, alpha 1 polypeptide | Rn.4231 |
| 628 | 83505 | rc_AA875598_at | AA875598 | 361258 | cullin 2 (predicted) | Rn.2970 |
| 629 | 83509 | rc_AA875617_at | NM_031083 | 81747 | phosphatidylinositol 4-kinase, catalytic, beta polypeptide | Rn.14991 |
| 630 | 83516 | rc_AA875641_at | AA875641 | | | |
| 631 | 83522 | rc_AA875665_g_at | NM_001008694 | 494125 | reticulocalbin 3, EF-hand calcium binding domain | Rn.2997 |
| 632 | 83635 | rc_AA891032_at | AA891032 | | | |
| 633 | 83642 | rc_AA891058_at | AA891058 | | | Rn.19936 |
| 634 | 83644 | rc_AA891069_at | AA891069 | 296753 | serine/arginine-rich protein specific kinase 2 (predicted) | Rn.13768 |
| 635 | 83649 | rc_AA891140_at | AA891140 | 361408 | similar to CDNA sequence BC027246 (predicted) | Rn.17087 |
| 635 | 83650 | rc_AA891140_g_at | AA891140 | 361408 | similar to CDNA sequence BC027246 (predicted) | Rn.17087 |
| 636 | 83655 | rc_AA891196_at | AA891196 | 300783 | similar to Butyrate-induced transcript 1 | Rn.48852 |
| 637 | 83660 | rc_AA891220_at | NM_177928 | 297508 | pre-B-cell colony enhancing factor 1 | Rn.7264 |
| 638 | 83661 | rc_AA891221_at | AA891221 | 293103 | similar to RIKEN cDNA 0610007P06 | Rn.96145 |
| 639 | 78837 | U63923_at | NM_031614 | 58819 | thioredoxin reductase 1 | Rn.67581 |
| 639 | 83671 | rc_AA891286_at | NM_031614 | 58819 | thioredoxin reductase 1 | Rn.67581 |
| 640 | 83681 | rc_AA891314_at | AA891314 | 363133 | poly(rC) binding protein 4 (predicted) | Rn.40405 |
| 641 | 83684 | rc_AA891356_at | AA891356 | 304650 | hypothetical LOC304650 (predicted) | Rn.40355 |
| 642 | 83685 | rc_AA891362_at | NM_057186 | 113965 | L-3-hydroxyacyl-Coenzyme A dehydrogenase, short chain | Rn.92789 |
| 643 | 83555 | rc_H31665_at | NM_080902 | 140937 | hypoxia induced gene 1 | Rn.2084 |
| 643 | 83688 | rc_AA891422_at | NM_080902 | 140937 | hypoxia induced gene 1 | Rn.2084 |
| 644 | 83689 | rc_AA891423_at | AA891423 | 361184 | similar to hypothetical protein FLJ12118 (predicted) | Rn.54352 |
| 645 | 83698 | rc_AA891476_at | AA891476 | | | Rn.24387 |
| 646 | 83702 | rc_AA891524_at | NM_001008367 | 361501 | similar to RIKEN cDNA 0610042E07 (predicted) | Rn.1804 |
| 647 | 83705 | rc_AA891542_at | AA891542 | 313811 | DnaJ (Hsp40) homolog, subfamily B, member 5 (predicted) | Rn.92865 |
| 648 | 83708 | rc_AA891553_at | NM_001004283 | 362952 | eukaryotic translation initiation factor 3 subunit 7 | Rn.3463 |
| 649 | 83716 | rc_AA891588_at | AA891588 | 301709 | similar to hypothetical protein E130310N06 | Rn.14693 |
| 650 | 83718 | rc_AA891591_at | NM_031356 | 83533 | programmed cell death 8 | Rn.8124 |
| 651 | 83720 | rc_AA891596_at | AA891596 | | | Rn.14694 |
| 652 | 83722 | rc_AA891614_at | NM_139332 | 246215 | two pore channel 1 | Rn.24484 |
| 653 | 83723 | rc_AA891631_at | AA891631 | | | Rn.14698 |
| 654 | 83729 | rc_AA891666_g_at | NM_001007804 | 287645 | similar to EAP30 subunit of ELL complex (predicted) | Rn.128189 |
| 655 | 83743 | rc_AA891713_at | NM_173340 | 317646 | ribosomal protein L13A | Rn.92211 |
| 656 | 83747 | rc_AA891719_at | AA891719 | 306460 | ectonucleotide pyrophosphatase/phosphodiesterase 6 (predicted) | Rn.8484 |
| 657 | 83748 | rc_AA891721_at | NM_001009647 | 293754 | mitochondrial ribosomal protein L16 | Rn.101972 |
| 658 | 83749 | rc_AA891724_at | NM_198765 | 306809 | bicaudal D homolog 2 (Drosophila) | Rn.103443 |
| 659 | 83752 | rc_AA891727_g_at | AA891727 | 361805 | similar to RIKEN cDNA 2900010M23 (predicted) | Rn.128924 |
| 660 | 83757 | rc_AA891737_at | AA891737 | | | Rn.3650 |
| 661 | 83761 | rc_AA891746_at | AA891746 | 296570 | endothelial differentiation-related factor 1 (predicted) | Rn.17092 |
| 662 | 81025 | rc_AA891764_s_at | NM_030827 | 29216 | low density lipoprotein receptor-related protein 2 | Rn.26430 |
| 663 | 83781 | rc_AA891810_at | AA891810 | | | Rn.17620 |
| 663 | 83782 | rc_AA891810_g_at | AA891810 | | | Rn.17620 |
| 664 | 83797 | rc_AA891838_at | AA891838 | 298586 | similar to ribosomal protein P0-like protein; 60S acidic ribosomal protein PO; | Rn.102515 |
| | | | | | ribosomal protein, large, P0-like (predicted) | |
| 665 | 83800 | rc_AA891842_g_at | AA891842 | 316256 | tumor necrosis factor receptor superfamily, member 21 (predicted) | Rn.98293 |
| 666 | 83803 | rc_AA891851_at | AA891851 | | | Rn.52727 |
| 667 | 83813 | rc_AA891877_at | AA891877 | | | Rn.114607 |
| 668 | 83815 | rc_AA891880_g_at | NM_022948 | 65042 | sideroflexin 3 | Rn.37545 |
| 669 | 83822 | rc_AA891903_at | AA891903 | | | Rn.14719 |
| 670 | 83824 | rc_AA891914_at | NM_001005383 | 300981 | aminoacylase 1 | Rn.3679 |
| 671 | 83825 | rc_AA891916_at | NM_032615 | 60418 | membrane interacting protein of RGS16 | Rn.3731 |
| 671 | 83826 | rc_AA891916_g_at | NM_032615 | 60418 | membrane interacting protein of RGS16 | Rn.3731 |
| 672 | 83827 | rc_AA891917_at | AA891917 | 310758 | capping protein (actin filament) muscle Z-line, alpha 1 (predicted) | Rn.13838 |
| 673 | 83838 | rc_AA891940_at | AA891940 | 310756 | similar to mKIAA1631 protein | Rn.3508 |
| 674 | 83839 | rc_AA891943_at | AA891943 | | | Rn.3564 |
| 675 | 83846 | rc_AA891969_at | AA891969 | 289810 | similar to small unique nuclear receptor co-repressor | Rn.102095 |
| 676 | 83851 | rc_AA892006_g_at | AA892006 | 360716 | ATPase, H+ transporting, V1 subunit A, isoform 1 (predicted) | Rn.1431 |
| 677 | 83855 | rc_AA892012_g_at | NM_013177 | 25721 | glutamate oxaloacetate transaminase 2 | Rn.98650 |
| 678 | 83857 | rc_AA892014_r_at | NM_139101 | 245960 | potassium channel regulator 1 | Rn.9968 |
| 679 | 83861 | rc_AA892042_at | AA892042 | 317335 | DEAD (Asp-Glu-Ala-Asp) box polypeptide 3, X-linked | Rn.95841 |
| 680 | 83862 | rc_AA892049_at | AA892049 | 364721 | histone 1, H4j (predicted) | Rn.15656 |
| 681 | 83871 | rc_AA892112_g_at | AA892112 | 361538 | proline dehydrogenase (oxidase) 2 (predicted) | Rn.4247 |
| 682 | 83886 | rc_AA892204_at | AA892204 | | | Rn.132398 |
| 683 | 83888 | rc_AA892228_at | AA892228 | 362160 | CUG triplet repeat, RNA binding protein 1 (predicted) | Rn.105713 |
| 684 | 76221 | rc_AA892248_at | AA892248 | | | |
| 684 | 76222 | rc_AA892248_g_at | AA892248 | | | |
| 685 | 83895 | rc_AA892258_at | NM_053524 | 85431 | NADPH oxidase 4 | Rn.14744 |
| 686 | 83912 | rc_AA892298_at | NM_175707 | 301432 | peptidylprolyl isomerase (cyclophilin)-like 3 | Rn.14747 |
| 687 | 83917 | rc_AA892303_g_at | NM_001009666 | 300078 | dynein, axonemal, light chain 4 (predicted) | Rn.3257 |
| 688 | 83919 | rc_AA892305_at | NM_001007707 | 315094 | brain protein 16 | Rn.17102 |
| 689 | 83922 | rc_AA892310_at | AA892310 | 306332 | adaptor-related protein complex AP-1, mu subunit 1 (predicted) | Rn.7484 |
| 690 | 83928 | rc_AA892318_g_at | AA892318 | 288656 | ADP-ribosylation factor-like 6 interacting protein 4 (predicted) | Rn.105729 |
| 691 | 83947 | rc_AA89237_g_at | AA892378 | 288584 | tetratricopeptide repeat domain 11 (predicted) | Rn.1298 |
| 692 | 83948 | rc_AA892380_at | AA892380 | 306780 | serine palmitoyltransferase, long chain base subunit 1 (predicted) | Rn.127885 |
| 693 | 83958 | rc_AA892400_at | NM_198736 | 293497 | potassium channel tetramerisation domain containing 13 | Rn.103144 |
| 694 | 83965 | rc_AA892462_at | AA892462 | | | Rn.3254 |
| 695 | 83969 | rc_AA892470_at | AA892470 | 289784 | H2A histone family, member V (predicted) | Rn.100938 |
| 696 | 83977 | rc_AA892498_at | NM_001005547 | 300733 | transmembrane 4 superfamily member 8 | Rn.998 |
| 697 | 83985 | rc_AA892520_at | AA892520 | 287721 | vesicle amine transport protein 1 homolog (T californica) (predicted) | Rn.9118 |
| 697 | 83986 | rc_AA892520_g_at | AA892520 | 287721 | vesicle amine transport protein 1 homolog (T californica) (predicted) | Rn.9118 |
| 698 | 83988 | rc_AA892526_at | AA892526 | | | Rn.137471 |
| 699 | 76243 | rc_AA892532_at | NM_001004442 | 286906 | thioredoxin domain containing 7 | Rn.2685 |
| 700 | 83999 | rc_AA892551_i_at | AA892551 | | | |
| 701 | 84004 | rc_AA892557_at | NM_001007802 | 316035 | chemokine-like factor super family 6 (predicted) | Rn.98431 |
| 702 | 84014 | rc_AA892578_at | AA892578 | 360757 | similar to RIKEN cDNA 6330406I15 (predicted) | Rn.14770 |
| 703 | 84015 | rc_AA892582_s_at | AA892582 | | | Rn.9810 |
| 704 | 84016 | rc_AA892593_at | AA892593 | | | |
| 705 | 84017 | rc_AA892598_at | NM_175580 | 290556 | guanine nucleotide binding protein-like 3 (nucleolar) | Rn.4110 |
| 705 | 84018 | rc_AA892598_g_at | NM_175580 | 290556 | guanine nucleotide binding protein-like 3 (nucleolar) | Rn.4110 |
| 706 | 84022 | rc_AA892630_at | AA892630 | 290027 | ADP-ribosyltransferase (NAD+, poly(ADP-ribose) polymerase)-like 2 | Rn.22730 |
| | | | | | (predicted) | |
| 707 | 84025 | rc_AA892635_g_at | AA892635 | | | Rn.129172 |
| 708 | 84031 | rc_AA892647_at | AA892647 | 306955 | histone 1, H4h (predicted) | Rn.44120 |
| 709 | 81037 | rc_AA892775_at | NM_012771 | 25211 | lysozyme | Rn.2283 |
| 710 | 84052 | rc_AA892779_at | AA892779 | 361351 | similar to RIKEN cDNA 3110052N05 (predicted) | Rn.7319 |
| 711 | 84069 | rc_AA892820_at | AA892820 | 306204 | filamin, beta (predicted) | Rn.1761 |
| 712 | 84072 | rc_AA892828_at | NM_001007620 | 289950 | pyruvate dehydrogenase (lipoamide) beta | Rn.102424 |
| 713 | 84076 | rc_AA892832_at | NM_134382 | 171400 | ELOVL family member 5, elongation of long chain fatty acids (yeast) | Rn.4243 |
| 714 | 84079 | rc_AA892843_at | NM_001007637 | 295224 | mitochondrial ribosomal protein L24 | Rn.3728 |
| 715 | 84083 | rc_AA892851_g_at | NM_001008521 | 315265 | protein tyrosine kinase 9 (predicted) | Rn.64467 |
| 716 | 84085 | rc_AA892855_at | NM_001009690 | 309201 | rod outer segment membrane protein 1 (predicted) | Rn.2058 |
| 717 | 84089 | rc_AA892860_g_at | AA892860 | 313845 | Son of sevenless homolog 1 (Drosophila) (predicted) | Rn.91844 |
| 718 | 84090 | rc_AA892861_at | AA892861 | 362576 | similar to RIKEN cDNA 2610528J11 (predicted) | Rn.1992 |
| 719 | 84106 | rc_AA892940_g_at | AA892940 | 287739 | similar to 116 kDa U5 small nuclear ribonucleoprotein component (U5 snRNP- | Rn.62495 |
| | | | | | specific protein, 116 kDa) (U5-116 kDa) | |
| 720 | 84115 | rc_AA892987_at | AA892987 | 361421 | TATA box binding protein (Tbp)-associated factor, RNA polymerase I, C | Rn.13462 |
| | | | | | (predicted) | |
| 721 | 84118 | rc_AA892997_at | AA892997 | | | Rn.23962 |
| 722 | 84128 | rc_AA893035_s_at | NM_134330 | 171179 | kidney expressed gene 1 | Rn.22745 |
| 723 | 84132 | rc_AA893043_at | AA893043 | | | Rn.9073 |
| 724 | 84153 | rc_AA893172_at | AA893172 | | | |
| 725 | 84158 | rc_AA893184_at | AA893184 | 311254 | similar to Ac1164 | Rn.2260 |
| 726 | 84181 | rc_AA893237_at | AA893237 | 300441 | hypothetical LOC300441 | Rn.13486 |
| 727 | 84182 | rc_AA893239_at | NM_053493 | 85255 | 2-hydroxyphytanoyl-Coenzyme A lyase | Rn.21425 |
| 728 | 84183 | rc_AA893242_at | NM_012820 | 25288 | acyl-CoA synthetase long-chain family member 1 | Rn.6215 |
| 728 | 84184 | rc_AA893242_g_at | NM_012820 | 25288 | acyl-CoA synthetase long-chain family member 1 | Rn.6215 |
| 729 | 84185 | rc_AA893244_at | AA893244 | 294103 | 3′-phosphoadenosine 5′-phosphosulfate synthase 2 (predicted) | Rn.79315 |
| 730 | 84186 | rc_AA893246_at | NM_199386 | 299159 | ATPase, H+ transporting, lysosomal 34 kDa, V1 subunit D | Rn.106041 |
| 731 | 84192 | rc_AA893280_at | NM_001007144 | 298199 | adipose differentiation-related protein | Rn.101967 |
| 732 | 84216 | rc_AA893493_i_at | AA893493 | | | Rn.107056 |
| 733 | 84224 | rc_AA893534_at | AA893534 | | | Rn.23024 |
| 734 | 84230 | rc_AA893584_at | AA893584 | 293938 | biogenesis of lysosome-related organelles complex-1, subunit 2 (predicted) | Rn.19119 |
| 735 | 84232 | rc_AA893592_at | AA893592 | 362182 | reticulocalbin (predicted) | Rn.103345 |
| 736 | 84250 | rc_AA893659_at | AA893659 | 362778 | similar to RIKEN cDNA 4933433P14 gene (predicted) | Rn.3701 |
| 737 | 84279 | rc_AA893770_g_at | NM_139104 | 245963 | EGF-like domain 7 | Rn.55456 |
| 738 | 84281 | rc_AA893781_at | AA893781 | 287443 | centaurin, beta 1 (predicted) | Rn.2165 |
| 739 | 84287 | rc_AA893821_at | NM_134398 | 171435 | p34 protein | Rn.12544 |
| 740 | 84291 | rc_AA893857_at | AA893857 | | | Rn.3104 |
| 741 | 84313 | rc_AA893984_at | AA893984 | 303073 | cytoplasmic FMR1 interacting protein 2 (predicted) | Rn.44008 |
| 742 | 84316 | rc_AA894004_at | AA894004 | 297339 | capping protein (actin filament), gelsolin-like (predicted) | Rn.8945 |
| 743 | 84317 | rc_AA894008_at | AA894008 | 313052 | similar to erythrocyte membrane protein band 4.1 (elliptocytosis 1, RH-linked) | Rn.99632 |
| | | | | | isoform 1 | |
| 744 | 84320 | rc_AA894016_at | AA894016 | 362251 | RNA-binding region (RNP1, RRM) containing 2 (predicted) | Rn.8555 |
| 745 | 84322 | rc_AA894027_at | AA894027 | | | |
| 746 | 84326 | rc_AA894045_at | NM_181822 | 294251 | natural cytotoxicity triggering receptor 3 | Rn.14846 |
| 747 | 84338 | rc_AA894092_at | AA894092 | 361945 | periostin, osteoblast specific factor (predicted) | Rn.30516 |
| 748 | 81056 | rc_AA894174_at | NM_001009668 | 300726 | electron transferring flavoprotein, alpha polypeptide | Rn.32496 |
| 749 | 84360 | rc_AA894200_g_at | AA894200 | 362816 | myosin, light polypeptide 6, alkali, smooth muscle and non-muscle (predicted) | Rn.969 |
| 750 | 84374 | rc_AA894259_at | AA894259 | 363852 | similar to RIKEN cDNA 2010110M21 | Rn.13525 |
| 751 | 84380 | rc_AA894292_at | AA894292 | 84420 | adenylate cyclase 7 | Rn.19450 |
| 752 | 84383 | rc_AA894304_at | AA894304 | | | Rn.112831 |
| 753 | 81059 | rc_AA894317_s_at | NM_032083 | 84030 | chimerin (chimaerin) 1 | Rn.11166 |
| 754 | 84387 | rc_AA894318_at | AA894318 | 298201 | similar to RIKEN cDNA B230312A22 (predicted) | Rn.63818 |
| 755 | 84393 | rc_AA894345_at | AA894345 | 364052 | phosphoprotein enriched in astrocytes 15 (predicted) | Rn.2945 |
| 756 | 81110 | rc_AA899106_at | NM_022267 | 64033 | cyclin D2 | Rn.96083 |
| 757 | 81116 | rc_AA900503_at | NM_019147 | 29146 | jagged 1 | Rn.88804 |
| 758 | 81126 | rc_AA900900_s_at | NM_032067 | 84014 | ralA binding protein 1 | Rn.7107 |
| 759 | 77051 | rc_AA925300_at | AA925300 | 303604 | mitogen activated protein kinase kinase kinase 3 (predicted) | Rn.72680 |
| 760 | 81191 | rc_AA925752_at | NM_031561 | 29184 | cd36 antigen | Rn.102418 |
| 761 | 77054 | rc_AA926129_at | AA926129 | 303380 | schlafen 2 (predicted) | Rn.105052 |
| 762 | 76254 | rc_AA926149_g_at | NM_012520 | 24248 | catalase | Rn.3001 |
| 763 | 81152 | rc_AA945169_at | NM_012681 | 24856 | transthyretin | Rn.1404 |
| 764 | 81154 | rc_AA945171_at | AA945171 | 83418 | apolipoprotein C-IV | Rn.33157 |
| 765 | 76346 | rc_AA945704_at | AA945704 | 361384 | DnaJ (Hsp40) homolog, subfamily B, member 1 (predicted) | Rn.7896 |
| 766 | 81162 | rc_AA945737_at | NM_022205 | 60628 | chemokine (C—X—C motif) receptor 4 | Rn.44431 |
| 767 | 76312 | rc_AA946040_at | AA946040 | | | Rn.6009 |
| 768 | 81166 | rc_AA946108_at | AA946108 | 286966 | laminin, alpha 3 | Rn.10597 |
| 769 | 81167 | rc_AA946251_at | NM_030829 | 59075 | G protein-coupled receptor kinase 5 | Rn.6500 |
| 770 | 81172 | rc_AA946439_at | AA946439 | | | Rn.10465 |
| 771 | 81226 | rc_AA957930_s_at | NM_017212 | 29477 | microtubule-associated protein tau | Rn.2455 |
| 772 | 81227 | rc_AA957961_at | NM_054006 | 117180 | unr protein | Rn.3562 |
| 772 | 81395 | rc_AI070521_s_at | NM_054006 | 117180 | unr protein | Rn.3562 |
| 772 | 82424 | X52311_at | NM_054006 | 117180 | unr protein | Rn.3562 |
| 773 | 76318 | rc_AA963449_s_at | NM_012941 | 25427 | cytochrome P450, subfamily 51 | Rn.107152 |
| 773 | 76319 | rc_AA997614_s_at | NM_012941 | 25427 | cytochrome P450, subfamily 51 | Rn.107152 |
| 773 | 76902 | U17697_s_at | NM_012941 | 25427 | cytochrome P450, subfamily 51 | Rn.107152 |
| 774 | 81235 | rc_AA964530_at | NM_024150 | 79119 | ADP-ribosylation factor 2 | Rn.62175 |
| 775 | 81238 | rc_AA965119_at | NM_031534 | 24883 | Wilms tumor 1 | Rn.92531 |
| 776 | 76343 | rc_AI007820_s_at | NM_001004082 | 301252 | heat shock 90 kDa protein 1, beta | Rn.98667 |
| 776 | 76344 | rc_AI008074_s_at | NM_001004082 | 301252 | heat shock 90 kDa protein 1, beta | Rn.98667 |
| 777 | 81262 | rc_AI007824_g_at | AI007824 | | | |
| 778 | 81263 | rc_AI007835_at | NM_053343 | 83825 | double cortin and calcium/calmodulin-dependent protein kinase-like 1 | Rn.80575 |
| 779 | 76186 | rc_AI009141_at | AI009141 | | | Rn.29900 |
| 780 | 76276 | rc_AI009390_at | AI009390 | 362588 | NADH dehydrogenase (ubiquinone) Fe—S protein 5b, 15 kDa (NADH-coenzyme | Rn.3392 |
| | | | | | Q reductase) (predicted) | |
| 781 | 81286 | rc_AI009605_at | NM_013216 | 26954 | Ras homolog enriched in brain | Rn.859 |
| 782 | 81292 | rc_AI010083_at | NM_057114 | 117254 | peroxiredoxin 1 | Rn.2845 |
| 783 | 81295 | rc_AI010453_at | NM_022519 | 24648 | serine (or cysteine) proteinase inhibitor, clade A (alpha-1 antiproteinase, | Rn.1419 |
| | | | | | antitrypsin), member 1 | |
| 784 | 76191 | rc_AI011706_at | AI011706 | 361814 | splicing factor, arginine/serine-rich 3 (SRp20) (predicted) | Rn.9002 |
| 785 | 81309 | rc_AI012595_at | NM_017039 | 24672 | protein phosphatase 2a, catalytic subunit, alpha isoform | Rn.1271 |
| 786 | 81325 | rc_AI013389_at | NM_012521 | 24249 | calbindin 3, (vitamin D-dependent calcium binding protein) | Rn.9974 |
| 787 | 81326 | rc_AI013472_at | NM_138905 | 192270 | ER transmembrane protein Dri 42 | Rn.12038 |
| 788 | 81329 | rc_AI013795_at | NM_022713 | 64679 | transglutaminase 4 (prostate) | Rn.9964 |
| 789 | 76170 | rc_AI013834_s_at | NM_024392 | 79244 | hydroxysteroid (17-beta) dehydrogenase4 | Rn.2082 |
| 790 | 81318 | rc_AI014135_at | AI014135 | | | |
| 791 | 81320 | rc_AI014163_at | NM_019242 | 29596 | interferon-related developmental regulator 1 | Rn.3723 |
| 792 | 81333 | rc_AI029183_s_at | NM_012567 | 24392 | gap junction membrane channel protein alpha 1 | Rn.10346 |
| 793 | 81334 | rc_AI029279_at | NM_053868 | 116647 | neuroligin 1 | Rn.10173 |
| 794 | 81342 | rc_AI031019_at | NM_172029 | 64514 | eukaryotic translation initiation factor 2B, subunit 1 alpha | Rn.9181 |
| 795 | 81359 | rc_AI044517_at | NM_017215 | 29482 | solute carrier family 1 (glial high affinity glutamate transporter), member 2 | Rn.10240 |
| 795 | 82215 | U15098_at | NM_017215 | 29482 | solute carrier family 1 (glial high affinity glutamate transporter), member 2 | Rn.10240 |
| 796 | 81361 | rc_AI044716_at | NM_153735 | 266777 | neuronal pentraxin 1 | Rn.54707 |
| 797 | 81362 | rc_AI044739_at | NM_133423 | 170956 | splicing factor YT521-B | Rn.48752 |
| 798 | 81366 | rc_AI044985_g_at | NM_019241 | 29586 | gap junction membrane channel protein beta 5 | Rn.16074 |
| 799 | 81392 | rc_AI070142_at | NM_017030 | 24624 | propionyl coenzyme A carboxylase, beta polypeptide | Rn.9732 |
| 800 | 81396 | rc_AI070577_at | NM_012817 | 25285 | insulin-like growth factor binding protein 5 | Rn.1593 |
| 801 | 81398 | rc_AI070783_at | NM_017313 | 29885 | RAB3A interacting protein | Rn.31889 |
| 802 | 81403 | rc_AI071104_at | NM_012774 | 25236 | glypican 3 | Rn.9717 |
| 803 | 81405 | rc_AI071299_at | NM_031135 | 81813 | TGFB inducible early growth response | Rn.2398 |
| 804 | 81412 | rc_AI071866_s_at | AI071866 | | | |
| 805 | 81426 | rc_AI073232_s_at | NM_019246 | 29606 | proprotein convertase subtilisin/kexin type 7 | Rn.10653 |
| 806 | 81471 | rc_AI101320_at | AI101320 | 29147 | jagged 2 | Rn.22459 |
| 807 | 81494 | rc_AI102044_at | AI102044 | | | |
| 808 | 81498 | rc_AI102205_s_at | NM_024000 | 79011 | vesicle-associated calmodulin-binding protein | Rn.9958 |
| 809 | 81513 | rc_AI103671_at | NM_053311 | 29598 | ATPase, Ca++ transporting, plasma membrane 1 | Rn.7208 |
| 810 | 81517 | rc_AI103911_at | NM_001008888 | 291103 | ubiquinol-cytochrome c reductase, Rieske iron-sulfur polypeptide 1 | Rn.2603 |
| 811 | 81518 | rc_AI103957_at | NM_013087 | 25621 | CD 81 antigen | Rn.1975 |
| 812 | 76313 | rc_AI104035_s_at | AI104035 | | | Rn.6009 |
| 813 | 76204 | rc_AI104077_at | AI104077 | | | Rn.30301 |
| 814 | 81527 | rc_AI104399_at | NM_022922 | 24849 | triosephosphate isomerase 1 | Rn.37838 |
| 815 | 81529 | rc_AI104513_at | NM_145783 | 252934 | cytochrome c oxidase, subunit Va | Rn.11077 |
| 816 | 81536 | rc_AI104781_at | NM_017260 | 29624 | arachidonate 5-lipoxygenase activating protein | Rn.18399 |
| 817 | 81539 | rc_AI105348_i_at | NM_017147 | 29271 | cofilin 1 | Rn.11675 |
| 818 | 81429 | rc_AI112173_at | NM_013113 | 25650 | ATPase, Na+/K+ transporting, beta 1 polypeptide | Rn.8925 |
| 819 | 81436 | rc_AI136396_at | NM_172034 | 64511 | farnesyltransferase, CAAX box, beta | Rn.8873 |
| 820 | 76228 | rc_AI136977_at | AI136977 | 260321 | FK506 binding protein 4 | Rn.23741 |
| 821 | 81447 | rc_AI137583_at | NM_013060 | 25587 | Inhibitor of DNA binding 2, dominant negative helix-loop-helix protein | Rn.3272 |
| 822 | 81451 | rc_AI138143_at | NM_012796 | 29487 | glutathione S-transferase, theta 2 | Rn.87212 |
| 823 | 81459 | rc_AI145367_at | NM_053874 | 116653 | CAP, adenylate cyclase-associated protein, 2 (yeast) | Rn.10229 |
| 824 | 81465 | rc_AI145680_s_at | NM_012716 | 25027 | solute carrier family 16 (monocarboxylic acid transporters), member 1 | Rn.6085 |
| 825 | 76347 | rc_AI169265_at | AI169265 | | | Rn.793 |
| 826 | 81483 | rc_AI169327_at | NM_053819 | 116510 | tissue inhibitor of metalloproteinase 1 | Rn.25754 |
| 826 | 81484 | rc_AI169327_g_at | NM_053819 | 116510 | tissue inhibitor of metalloproteinase 1 | Rn.25754 |
| 827 | 81544 | rc_AI169612_at | NM_053365 | 79451 | fatty acid binding protein 4, adipocyte | Rn.4258 |
| 828 | 81548 | rc_AI169756_s_at | AI169756 | | | Rn.100336 |
| 829 | 76133 | rc_AI170379_at | AI170379 | | | Rn.101657 |
| 830 | 81557 | rc_AI170411_s_at | NM_053591 | 94199 | dipeptidase 1 (renal) | Rn.6051 |
| 831 | 81559 | rc_AI170608_at | NM_031616 | 58821 | zinc finger protein 265 | Rn.11361 |
| 832 | 76288 | rc_AI170685_at | NM_032079 | 84026 | DnaJ (Hsp40) homolog, subfamily A, member 2 | Rn.3904 |
| 832 | 76289 | rc_AI170685_g_at | NM_032079 | 84026 | DnaJ (Hsp40) homolog, subfamily A, member 2 | Rn.3904 |
| 833 | 79331 | Z18878cds_at | NM_053994 | 117098 | pyruvate dehydrogenase E1 alpha 2 | Rn.11126 |
| 833 | 81563 | rc_AI170911_at | NM_053994 | 117098 | pyruvate dehydrogenase E1 alpha 2 | Rn.11126 |
| 834 | 81565 | rc_AI171067_at | NM_012600 | 24552 | malic enzyme 1 | Rn.3519 |
| 835 | 81577 | rc_AI171844_at | NM_139099 | 245958 | ATP synthase, H+ transporting, mitochondrial F1 complex, epsilon subunit | Rn.3454 |
| 836 | 81584 | rc_AI172064_at | NM_019904 | 56646 | lectin, galactose binding, soluble 1 | Rn.57 |
| 837 | 76357 | rc_AI172452_at | AI172452 | 298762 | cytochrome c oxidase subunit VIIa polypeptide 2 like (predicted) | Rn.3907 |
| 838 | 81595 | rc_AI175486_at | AI175486 | 298661 | hypothetical LOC298661 | Rn.119388 |
| 839 | 81606 | rc_AI175935_at | NM_173101 | 25484 | myosin IE | Rn.8737 |
| 840 | 81611 | rc_AI176351_s_at | NM_031137 | 81815 | tripeptidyl peptidase II | Rn.28991 |
| 840 | 81644 | rc_AI178007_at | NM_031137 | 81815 | tripeptidyl peptidase II | Rn.28991 |
| 841 | 81613 | rc_AI176460_s_at | AI176460 | | | |
| 842 | 81614 | rc_AI176461_s_at | NM_017211 | 29476 | golgi apparatus protein 1 | Rn.89086 |
| 842 | 82500 | U08136_at | NM_017211 | 29476 | golgi apparatus protein 1 | Rn.89086 |
| 843 | 81620 | rc_AI176595_s_at | NM_013156 | 25697 | cathepsin L | Rn.1294 |
| 844 | 81624 | rc_AI176710_at | NM_031628 | 58853 | nuclear receptor subfamily 4, group A, member 3 | Rn.62694 |
| 845 | 76293 | rc_AI176726_at | AI176726 | | | |
| 846 | 81629 | rc_AI177052_at | AI177052 | 25281 | nucleoporin 153 kD | Rn.1347 |
| 847 | 81632 | rc_AI177161_at | NM_031789 | 83619 | nuclear factor, erythroid derived 2, like 2 | Rn.10867 |
| 847 | 81633 | rc_AI177161_g_at | NM_031789 | 83619 | nuclear factor, erythroid derived 2, like 2 | Rn.10867 |
| 848 | 81637 | rc_AI177503_at | NM_053985 | 117056 | H3 histone, family 3B | Rn.29857 |
| 849 | 81654 | rc_AI179012_s_at | NM_031144 | 81822 | actin, beta | Rn.94978 |
| 850 | 81660 | rc_AI179610_at | NM_012580 | 24451 | heme oxygenase (decycling) 1 | Rn.3160 |
| 851 | 81663 | rc_AI180013_at | NM_033351 | 29558 | Fc receptor, IgG, alpha chain transporter | Rn.15845 |
| 852 | 81668 | rc_AI180410_i_at | NM_020079 | 24658 | prolactin-like protein C 1 | Rn.40117 |
| 853 | 81671 | rc_AI180424_at | NM_013011 | 25578 | tyrosine 3-monooxygenase/tryptophan 5-monooxygenase activation protein, | Rn.1292 |
| | | | | | zeta polypeptide | |
| 854 | 81672 | rc_AI180442_at | NM_031840 | 83791 | farensyl diphosphate synthase | Rn.2848 |
| 855 | 81678 | rc_AI228247_at | NM_013106 | 25643 | guanine nucleotide binding protein, alpha inhibiting 3 | Rn.4368 |
| 856 | 81696 | rc_AI230211_s_at | NM_031739 | 65195 | potassium voltage gated channel, Shal-related family, member 3 | Rn.10540 |
| 857 | 81700 | rc_AI230354_at | NM_022538 | 64369 | phosphatidic acid phosphatase 2a | Rn.61687 |
| 858 | 81705 | rc_AI230712_at | NM_012999 | 25507 | Subtilisin - like endoprotease | Rn.950 |
| 859 | 81706 | rc_AI230748_at | NM_053867 | 116646 | tumor protein, translationally-controlled 1 | Rn.36610 |
| 860 | 81722 | rc_AI231445_at | AI231445 | | | Rn.121327 |
| 861 | 81726 | rc_AI231807_at | NM_022500 | 29292 | ferritin light chain 1 | Rn.1905 |
| 862 | 81729 | rc_AI232078_at | NM_021587 | 59107 | latent transforming growth factor beta binding protein 1 | Rn.40942 |
| 863 | 81731 | rc_AI232096_at | NM_031672 | 60577 | solute carrier family 15 (H+/peptide transporter), member 2 | Rn.89268 |
| 864 | 81732 | rc_AI232194_at | NM_032084 | 84031 | chimerin (chimaerin) 2 | Rn.10521 |
| 865 | 81733 | rc_AI232256_at | NM_030586 | 80773 | cytochrome b5, outer mitochondrial membrane isoform | Rn.10249 |
| 866 | 81734 | rc_AI232268_at | AI232268 | 116565 | low density lipoprotein receptor-related protein associated protein 1 | Rn.10293 |
| 867 | 81755 | rc_AI234351_at | AI234351 | 363828 | similar to immunoglobulin light chain variable region | Rn.129 |
| 868 | 81759 | rc_AI234915_at | AI234915 | 303907 | WD repeat domain 5B (predicted) | Rn.38769 |
| 869 | 81778 | rc_AI236484_at | NM_198132 | 362152 | heterogeneous nuclear ribonucleoprotein A3 | Rn.99947 |
| 870 | 76224 | rc_AI236601_at | NM_001011901 | 288444 | heat shock protein 105 (predicted) | Rn.37805 |
| 871 | 81784 | rc_AI237535_s_at | AI237535 | 65161 | LPS-induced TNF-alpha factor | Rn.6940 |
| 872 | 81786 | rc_AI237592_at | AI237592 | 117060 | progestin induced protein | Rn.54812 |
| 873 | 81789 | rc_AI237825_at | NM_012533 | 24271 | carboxypeptidase B1 | Rn.12780 |
| 874 | 80438 | rc_AI638939_at | AI638939 | 303970 | bobby sox homolog (Drosophila) (predicted) | Rn.113000 |
| 875 | 80439 | rc_AI638940_at | AI638940 | | | |
| 876 | 80450 | rc_AI638951_at | AI638951 | | | |
| 877 | 80451 | rc_AI638952_at | AI638952 | | | |
| 878 | 80465 | rc_AI638969_at | NM_133605 | 171140 | calcium/calmodulin-dependent protein kinase II gamma | Rn.10961 |
| 879 | 80489 | rc_AI638996_at | AI638996 | | | |
| 880 | 80497 | rc_AI639007_at | AI639007 | | | |
| 881 | 80523 | rc_AI639035_at | AI639035 | | | Rn.28819 |
| 882 | 80545 | rc_AI639058_s_at | AI639058 | 311676 | transmembrane, prostate androgen induced RNA (predicted) | Rn.108034 |
| 883 | 80546 | rc_AI639060_at | AI639060 | | | Rn.135652 |
| 884 | 80551 | rc_AI639065_at | AI639065 | | | |
| 885 | 80556 | rc_AI639071_at | AI639071 | | | |
| 886 | 80589 | rc_AI639107_at | AI639107 | 364396 | ADP-ribosylation factor-like 11 (predicted) | Rn.23090 |
| 887 | 80596 | rc_AI639115_at | NM_198743 | 296466 | BWK-1 | Rn.28608 |
| 888 | 80610 | rc_AI639132_s_at | AI639132 | 297903 | similar to RIKEN cDNA 6720467C03 (predicted) | Rn.92601 |
| 889 | 80629 | rc_AI639152_at | AI639152 | 314406 | similar to Alpha-1-antitrypsin-related protein precursor (predicted) | Rn.99752 |
| 890 | 80651 | rc_AI639175_at | AI639175 | | | |
| 891 | 80655 | rc_AI639179_at | AI639179 | | | |
| 892 | 80656 | rc_AI639181_at | AI639181 | | | Rn.131203 |
| 893 | 80664 | rc_AI639189_at | AI639189 | 303572 | similar to nuclear protein with a coiled coil-4 domain of bilaterial origin like | Rn.136691 |
| | | | | | (3L720) | |
| 894 | 80665 | rc_AI639190_at | AI639190 | | | |
| 895 | 80667 | rc_AI639192_at | AI639192 | | | |
| 896 | 80684 | rc_AI639209_at | AI639209 | | | |
| 897 | 80685 | rc_AI639210_at | AI639210 | 313352 | doublesex and mab-3 related transcription factor like family A1 (predicted) | Rn.43064 |
| 898 | 80686 | rc_AI639212_at | NM_017298 | 29716 | calcium channel, voltage-dependent, L type, alpha 1D subunit | Rn.89671 |
| 899 | 80691 | rc_AI639217_at | AI639217 | | | |
| 900 | 80692 | rc_AI639218_at | NM_001009268 | 289820 | ARP2 actin-related protein 2 homolog (yeast) (predicted) | Rn.102249 |
| 901 | 80715 | rc_AI639246_at | AI639246 | 293186 | extra cellular link domain-containing 1 (predicted) | Rn.123582 |
| 902 | 80723 | rc_AI639252_at | AI639252 | | | |
| 903 | 80728 | rc_AI639256_at | NM_181376 | 301255 | spermatogenesis associated, serine-rich 1 | Rn.40672 |
| 904 | 80733 | rc_AI639263_at | AI639263 | | | |
| 905 | 80734 | rc_AI639264_at | AI639264 | | | |
| 906 | 80755 | rc_AI639293_at | AI639293 | | | |
| 907 | 80788 | rc_AI639324_g_at | AI639324 | 307390 | F-box protein 38 (predicted) | Rn.13347 |
| 908 | 80792 | rc_AI639328_at | AI639328 | | | |
| 909 | 80793 | rc_AI639329_at | AI639329 | 307075 | WD repeat domain 37 (predicted) | Rn.43138 |
| 910 | 80805 | rc_AI639343_at | AI639343 | | | Rn.13858 |
| 911 | 80831 | rc_AI639370_at | NM_001007725 | 360647 | intercellular adhesion molecule 2 | Rn.112767 |
| 912 | 80857 | rc_AI639400_at | AI639400 | | | Rn.135073 |
| 913 | 80861 | rc_AI639404_at | AI639404 | | | |
| 914 | 80862 | rc_AI639405_at | NM_138831 | 170566 | solute carrier family 16 (monocarboxylic acid transporters), member 10 | Rn.21992 |
| 915 | 80868 | rc_AI639411_at | NM_207614 | 362855 | P55 | Rn.11875 |
| 916 | 80870 | rc_AI639412_at | AI639412 | 306805 | similar to asporin precursor | Rn.45067 |
| 917 | 80888 | rc_AI639432_at | AI639432 | | | |
| 918 | 80018 | U38253_g_at | NM_133609 | 171145 | eukaryotic translation initiation factor 2B, subunit 3 gamma | Rn.10577 |
| 918 | 80897 | rc_AI639441_at | NM_133609 | 171145 | eukaryotic translation initiation factor 2B, subunit 3 gamma | Rn.10577 |
| 919 | 80901 | rc_AI639444_g_at | NM_057191 | 117537 | kelch repeat and BTB (POZ) domain containing 10 | Rn.28875 |
| 920 | 80920 | rc_AI639461_at | AI639461 | | | Rn.120244 |
| 921 | 80927 | rc_AI639467_at | AI639467 | 25716 | synaptotagmin 1 | Rn.7596 |
| 922 | 80937 | rc_AI639476_s_at | AI639476 | 304582 | squamous cell carcinoma antigen recognized by T-cells 3 (predicted) | Rn.101480 |
| 923 | 80954 | rc_AI639495_at | AI639495 | | | |
| 924 | 80957 | rc_AI639498_i_at | AI639498 | | | |
| 925 | 80964 | rc_AI639505_at | AI639505 | | | |
| 926 | 80975 | rc_AI639518_at | AI639518 | 287988 | polymerase (RNA) II (DNA directed) polypeptide H (predicted) | Rn.9160 |
| 927 | 80998 | rc_AI639536_at | AI639536 | | | Rn.64791 |
| 928 | 83529 | rc_H31232_at | NM_053472 | 84683 | cytochrome c oxidase subunit IV isoform 2 | Rn.7214 |
| 929 | 83544 | rc_H31535_at | H31535 | 303564 | similar to RIKEN cDNA 2610511E22 (predicted) | Rn.94772 |
| 930 | 83545 | rc_H31550_at | H31550 | | | Rn.14572 |
| 931 | 83546 | rc_H31554_at | H31554 | | | Rn.14573 |
| 932 | 83549 | rc_H31597_at | NM_153294 | 259224 | prepro-Neuropeptide W polypeptide | Rn.14575 |
| 933 | 83556 | rc_H31692_at | NM_021597 | 59117 | GERp95 | Rn.35512 |
| 934 | 83572 | rc_H31887_at | H31887 | 311428 | similar to RIKEN cDNA 1700037H04 (predicted) | Rn.28249 |
| 935 | 83573 | rc_H31897_at | H31897 | | | Rn.21418 |
| 936 | 83578 | rc_H31964_at | H31964 | | | Rn.23171 |
| 937 | 83581 | rc_H31990_at | H31990 | | | |
| 938 | 83587 | rc_H33084_at | H33084 | | | |
| 939 | 83593 | rc_H33149_at | H33149 | 361151 | similar to RIKEN cDNA 1810047C23 (predicted) | Rn.14630 |
| 940 | 83611 | rc_H33528_at | H33528 | | | Rn.14645 |
| 941 | 83614 | rc_H33566_at | H33566 | | | Rn.92617 |
| 942 | 83615 | rc_H33577_at | H33577 | | | Rn.131034 |
| 943 | 83621 | rc_H33660_at | H33660 | 299153 | similar to chromosome 14 open reading frame 50 (predicted) | Rn.3331 |
| 944 | 78424 | S42358_s_at | NM_024372 | 79213 | solute carrier family 6 (neurotransmitter transporter, GABA), member 11 | Rn.10545 |
| 945 | 78426 | S43408_g_at | NM_013143 | 25684 | meprin 1 alpha | Rn.16265 |
| 946 | 78428 | S45663_at | NM_138549 | 191576 | glycoprotein, synaptic 2 | Rn.107358 |
| 947 | 78435 | S46798cds#1_s_at | S46798 | | | |
| 948 | 78445 | S50461_s_at | NM_031034 | 81663 | guanine nucleotide binding protein, alpha 12 | Rn.10497 |
| 949 | 78452 | S53987_at | S53987 | | | |
| 950 | 78457 | S55427_s_at | NM_017037 | 24660 | peripheral myelin protein 22 | Rn.1476 |
| 951 | 78460 | S56464mRNA_at | S56464 | | | |
| 951 | 78461 | S56464mRNA_g_at | S56464 | | | |
| 952 | 78470 | S58528_at | S58528 | | | |
| 953 | 78478 | S60054_s_at | NM_012642 | 24715 | renin 1 | Rn.9831 |
| 954 | 78481 | S61868_at | NM_012649 | 24771 | syndecan 4 | Rn.2029 |
| 954 | 78482 | S61868_g_at | NM_012649 | 24771 | syndecan 4 | Rn.2029 |
| 955 | 78485 | S61960_s_at | S61960 | 311844 | cysteine conjugate-beta lyase (predicted) | Rn.110564 |
| 956 | 78486 | S61973_at | NM_153308 | 266668 | glutamate receptor, ionotropic, N-methyl D-asparate-associated protein 1 | Rn.5898 |
| | | | | | (glutamate binding) | |
| 957 | 78489 | S62096_s_at | NM_031654 | 58983 | Rab geranylgeranyl transferase, a subunit | Rn.29434 |
| 958 | 78495 | S63233_g_at | NM_053290 | 24642 | phosphoglycerate mutase 1 | Rn.1383 |
| 959 | 78505 | S65091_at | S65091 | 25519 | protein phosphatase 1, regulatory subunit 1C | |
| 960 | 78509 | S65555_at | NM_017305 | 29739 | glutamate cysteine ligase, modifier subunit | Rn.2460 |
| 960 | 78510 | S65555_g_at | NM_017305 | 29739 | glutamate cysteine ligase, modifier subunit | Rn.2460 |
| 961 | 78511 | S66024_at | NM_017334 | 25620 | cAMP responsive element modulator | Rn.10251 |
| 961 | 78512 | S66024_g_at | NM_017334 | 25620 | cAMP responsive element modulator | Rn.10251 |
| 962 | 78513 | S66184_s_at | NM_017061 | 24914 | lysyl oxidase | Rn.11372 |
| 962 | 78601 | S77494_s_at | NM_017061 | 24914 | lysyl oxidase | Rn.11372 |
| 963 | 78516 | S67435_s_at | NM_022852 | 29535 | pancreatic and duodenal homeobox gene 1 | Rn.54603 |
| 964 | 78521 | S67900_s_at | NM_080477 | 24640 | 6-phosphofructo-2-kinase/fructose-2,6-biphosphatase 2 | Rn.44844 |
| 965 | 78529 | S68809_s_at | NM_001007636 | 295214 | S100 calcium binding protein A1 | Rn.11091 |
| 966 | 78532 | S69160_s_at | NM_013047 | 25570 | thyrotropin releasing hormone receptor | Rn.9962 |
| 967 | 76994 | X78848cds_f_at | NM_031509 | 24421 | glutathione S-transferase A5 | Rn.40574 |
| 967 | 78555 | S72505_f_at | NM_031509 | 24421 | glutathione S-transferase A5 | Rn.10460 |
| 968 | 78557 | S72594_s_at | NM_021989 | 29543 | tissue inhibitor of metalloproteinase 2 | Rn.10161 |
| 969 | 78563 | S73424_s_at | NM_031051 | 81683 | macrophage migration inhibitory factor | Rn.2661 |
| 970 | 78569 | S74257_g_at | S74257 | | | |
| 971 | 78572 | S74393_s_at | NM_013001 | 25509 | paired box gene 6 | Rn.89724 |
| 972 | 78574 | S74572_g_at | NM_033096 | 24667 | protein phosphatase 1B, magnesium dependent, beta isoform | Rn.4143 |
| 973 | 78595 | S76466_at | NM_199230 | 29381 | activin A receptor, type 1B | Rn.103436 |
| 974 | 78602 | S77528cds_s_at | NM_024125 | 24253 | CCAAT/enhancer binding protein (C/EBP), beta | Rn.6479 |
| 974 | 82411 | X60769mRNA_at | NM_024125 | 24253 | CCAAT/enhancer binding protein (C/EBP), beta | Rn.6479 |
| 975 | 78603 | S77532_at | S77532 | | | |
| 976 | 78604 | S77556_s_at | NM_013137 | 25678 | discoidin domain receptor family, member 1 | Rn.7807 |
| 977 | 78606 | S77858_s_at | S77858 | | | |
| 978 | 78616 | S78556_at | S78556 | | | |
| 979 | 78623 | S79304_s_at | S79304 | | | |
| 980 | 78629 | S79730_s_at | NM_013007 | 25516 | prepronociceptin | Rn.87935 |
| 981 | 78634 | S79820_g_at | S79820 | | | |
| 982 | 78638 | S80118_s_at | S80118 | | | |
| 983 | 78639 | S80127_s_at | NM_017044 | 24694 | parathyroid hormone | Rn.9768 |
| 984 | 78642 | S80379_s_at | S80379 | | | |
| 985 | 78644 | S80456_s_at | NM_012613 | 24603 | natriuretic peptide receptor 1 | Rn.10463 |
| 986 | 78653 | S81497_s_at | NM_012732 | 25055 | lipase A, lysosomal acid | Rn.48656 |
| 987 | 78670 | S83320_g_at | S83320 | | | |
| 988 | 76872 | S83436_i_at | NM_181371 | 297029 | glutathione S-transferase, mitochondrial | Rn.109452 |
| 989 | 78672 | S85184_at | S85184 | | | |
| 989 | 78673 | S85184_g_at | S85184 | | | |
| 990 | 78679 | S94371_at | S94371 | | | |
| 991 | 79818 | U02316_s_at | NM_031588 | 112400 | neuregulin 1 | Rn.37438 |
| 992 | 82149 | U02522_at | NM_022588 | 6452 | metastasis associated 1 | Rn.5840 |
| 993 | 79758 | U03120_at | NM_013033 | 25552 | solute carrier family 5 (sodium/glucose cotransporter), member 1 | Rn.10224 |
| 994 | 79594 | U03414_s_at | NM_053573 | 93667 | olfactomedin 1 | Rn.11005 |
| 995 | 78694 | U03763cds_at | NM_017174 | 29354 | phospholipase A2, group V | Rn.20244 |
| 996 | 79330 | Z15158mRNA_at | NM_013086 | 25620 | cAMP responsive element modulator | Rn.10251 |
| 996 | 79773 | U04835_at | NM_013086 | 25620 | cAMP responsive element modulator | Rn.10251 |
| 997 | 79725 | U04998_at | NM_013080 | 25613 | protein tyrosine phosphatase, receptor-type, Z polypeptide 1 | Rn.10088 |
| 998 | 76888 | U05014_at | NM_053857 | 116636 | eukaryotic translation initiation factor 4E binding protein 1 | Rn.11161 |
| 999 | 82060 | U05675_at | NM_020071 | 24366 | fibrinogen, B beta polypeptide | Rn.11416 |
| 1000 | 76715 | U06099_at | NM_017169 | 29338 | peroxiredoxin 2 | Rn.2511 |
| 1001 | 78701 | U06752_at | U06752 | 171578 | mucin 4 | Rn.24930 |
| 1002 | 82002 | U07683_at | NM_019276 | 50555 | UDP-glucuronosyltransferase 8 | Rn.9744 |
| 1003 | 79624 | U08256_at | NM_024379 | 79220 | glutamate receptor, ionotropic, delta 2 | Rn.10046 |
| 1004 | 82439 | U09228_at | NM_053369 | 84382 | transcription factor 4 | Rn.23354 |
| 1005 | 79921 | U09229_at | U09229 | 116639 | cut-like 1 (Drosophila) | Rn.10455 |
| 1006 | 78709 | U09401_s_at | U09401 | 116640 | tenascin C | Rn.12723 |
| 1007 | 82163 | U10188_at | NM_017100 | 25515 | polo-like kinase 1 (Drosophila) | Rn.11034 |
| 1008 | 79623 | U11031_at | NM_019329 | 54279 | contactin 3 | Rn.10043 |
| 1009 | 82032 | U11760_at | NM_053864 | 116643 | valosin-containing protein | Rn.98891 |
| 1010 | 79754 | U12184_at | NM_030831 | 80840 | G-protein coupled receptor 12 | Rn.88417 |
| 1011 | 79888 | U12514_at | NM_012982 | 25483 | msh homeo box homolog 2 (Drosophila) | Rn.10414 |
| 1012 | 82031 | U14007_at | NM_012825 | 25293 | aquaporin 4 | Rn.90091 |
| 1013 | 82176 | U14746_at | NM_052801 | 24874 | von Hippel-Lindau syndrome homolog | Rn.11059 |
| 1014 | 79659 | U17253_at | NM_022856 | 64824 | Ngfi-A binding protein 1 | Rn.10099 |
| 1015 | 76900 | U17260_s_at | NM_053853 | 116631 | N-acetyltransferase 1 (arylamine N-acetyltransferase) | Rn.37420 |
| 1016 | 79070 | X52817cds_s_at | NM_053865 | 116644 | reticulon 1 | Rn.55126 |
| 1016 | 82662 | U17604_at | NM_053865 | 116644 | reticulon 1 | Rn.55126 |
| 1017 | 82094 | U18771_at | NM_133580 | 171111 | RAB26, member RAS oncogene family | Rn.10975 |
| 1018 | 76903 | U18982_s_at | NM_012954 | 25446 | fos-like antigen 2 | Rn.10962 |
| 1019 | 82090 | U19614_at | NM_145092 | 246314 | lamina-associated polypeptide 1B | Rn.11373 |
| 1020 | 78731 | U20110cds_at | NM_053325 | 60566 | synaptotagmin 8 | Rn.46519 |
| 1021 | 79688 | U20181_at | NM_022863 | 64831 | iron responsive element binding protein 2 | Rn.10132 |
| 1022 | 79684 | U20283_at | NM_031126 | 81804 | syntaxin binding protein 2 | Rn.10121 |
| 1023 | 76904 | U20643mRNA#2_f_at | NM_012495 | 24189 | aldolase A | Rn.1774 |
| 1024 | 82039 | U20796_at | NM_147210 | 259241 | nuclear receptor subfamily 1, group D, member 2 | Rn.10055 |
| 1025 | 78735 | U21719mRNA_s_at | U21719 | 361847 | DEAD (Asp-Glu-Ala-Asp) box polypeptide 21b (predicted) | Rn.27170 |
| 1026 | 79694 | U22414_at | NM_013025 | 25542 | chemokine (C-C motif) ligand 3 | Rn.10139 |
| 1027 | 78739 | U23146cds_s_at | NM_057103 | 83425 | A kinase (PRKA) anchor protein (gravin) 12 | Rn.122094 |
| 1027 | 78779 | U41453_at | NM_057103 | 83425 | A kinase (PRKA) anchor protein (gravin) 12 | Rn.122094 |
| 1028 | 82134 | U23407_at | NM_017244 | 29563 | cellular retinoic acid binding protein 2 | Rn.11333 |
| 1029 | 76905 | U23438_at | NM_022199 | 60587 | dual specificity phosphatase 4 | Rn.44407 |
| 1030 | 82207 | U23769_at | NM_017365 | 54133 | PDZ and LIM domain 1 (elfin) | Rn.11170 |
| 1031 | 79787 | U25137_at | NM_017064 | 24918 | signal transducer and activator of transcription 5A | Rn.11355 |
| 1032 | 78740 | U25148_at | U25148 | 299509 | myosin IA | Rn.96429 |
| 1033 | 76731 | X05137_at | NM_012610 | 24596 | nerve growth factor receptor (TNFR superfamily, member 16) | Rn.10980 |
| 1033 | 76906 | U25650_f_at | NM_012610 | 24596 | nerve growth factor receptor (TNFR superfamily, member 16) | Rn.10980 |
| 1034 | 82148 | U26033_at | NM_031987 | 83842 | carnitine O-octanoyltransferase | Rn.4896 |
| 1035 | 82480 | U26397_at | NM_031002 | 80849 | inositol polyphosphate-4-phosphatase, type 1 | Rn.11215 |
| 1036 | 82848 | U30381_at | NM_031615 | 58820 | zinc finger protein 148 | Rn.64671 |
| 1037 | 82167 | U30831_at | NM_138849 | 192189 | B/K protein | Rn.31973 |
| 1038 | 78749 | U31160mRNA_s_at | NM_147211 | 259242 | SH3 domain binding protein CR16 | Rn.11272 |
| 1039 | 82136 | U31777_at | NM_017228 | 29515 | dentatorubral pallidoluysian atrophy | Rn.11305 |
| 1040 | 78759 | U33441mRNA_s_at | NM_133513 | 65182 | mucin 10, submandibular gland salivary mucin | Rn.10113 |
| 1041 | 79726 | U35774_at | NM_017253 | 29592 | branched chain aminotransferase 1, cytosolic | Rn.8273 |
| 1042 | 82130 | U35775_g_at | NM_031552 | 25230 | adducin 3 (gamma) | Rn.76589 |
| 1043 | 78762 | U36444cds#1_g_at | NM_031077 | 81741 | PCTAIRE-motif protein kinase 1 | Rn.16871 |
| 1044 | 78765 | U36771_g_at | NM_017274 | 29653 | glycerol-3-phosphate acyltransferase, mitochondrial | Rn.44456 |
| 1044 | 78767 | U36773_g_at | NM_017274 | 29653 | glycerol-3-phosphate acyltransferase, mitochondrial | Rn.44456 |
| 1045 | 76691 | U38376_s_at | NM_133551 | 24653 | phospholipase A2, group IVA (cytosolic, calcium-dependent) | Rn.10162 |
| 1046 | 82601 | U38481_at | NM_013022 | 25537 | Rho-associated coiled-coil forming kinase 2 | Rn.88642 |
| 1047 | 78773 | U39571_at | U39571 | | | |
| 1048 | 78775 | U39608_at | U39608 | | | |
| 1049 | 82520 | U39875_at | NM_024139 | 64152 | calcium binding protein p22 | Rn.11041 |
| 1050 | 78778 | U40819_at | NM_019142 | 65248 | protein kinase, AMP-activated, alpha 1 catalytic subunit | Rn.87789 |
| 1051 | 76916 | U40836mRNA_s_at | NM_012786 | 25250 | Cytochrom C oxidase subunit VIII-H (heart/muscle) | Rn.10325 |
| 1052 | 82715 | U41845_at | NM_012991 | 25497 | nuclear pore associated protein | Rn.3242 |
| 1053 | 76765 | U41853_at | NM_138867 | 192235 | hypoxia up-regulated 1 | Rn.10542 |
| 1054 | 82236 | U43534_at | NM_012894 | 25367 | adenosine deaminase, RNA-specific, B1 | Rn.89675 |
| 1055 | 78781 | U47014_at | U47014 | 116548 | proprotein convertase subtilisin/kexin type 5 | Rn.127948 |
| 1056 | 80045 | U47110_at | NM_022184 | 29647 | calcium/calmodulin-dependent serine protein kinase | Rn.72627 |
| 1057 | 76919 | U47313_at | U47313 | | | Rn.1712 |
| 1058 | 76921 | U47315_s_at | NM_133561 | 171087 | brain protein 44-like | Rn.3718 |
| 1059 | 76101 | U48220_at | NM_138515 | 171522 | cytochrome P450, family 2, subfamily d, polypeptide 22 | Rn.26060 |
| 1060 | 76754 | U48596_at | NM_053887 | 116667 | mitogen activated protein kinase kinase kinase 1 | Rn.11081 |
| 1061 | 82488 | U49099_at | U49099 | | | |
| 1062 | 76767 | U49930_at | NM_012922 | 25402 | caspase 3 | Rn.10562 |
| 1063 | 80029 | U50412_at | NM_013005 | 25513 | phosphatidylinositol 3-kinase, regulatory subunit, polypeptide 1 | Rn.133464 |
| 1064 | 78801 | U52034cds_i_at | NM_022175 | 24631 | placentae and embryos oncofetal gene | Rn.44483 |
| 1065 | 78807 | U52950_g_at | U52950 | 29456 | microtubule-associated protein 1b | Rn.98152 |
| 1066 | 82243 | U53184_at | U53184 | 65161 | LPS-induced TNF-alpha factor | Rn.6940 |
| 1067 | 82483 | U53211_at | NM_012892 | 25364 | amiloride-sensitive cation channel 1, neuronal (degenerin) | Rn.37523 |
| 1068 | 78810 | U53486mRNA_s_at | NM_030999 | 58959 | corticotropin releasing hormone receptor 1 | Rn.10499 |
| 1069 | 82264 | U53513_at | U53513 | 246295 | glycine-, glutamate-, thienylcyclohexylpiperidine-binding protein | |
| 1070 | 82267 | U53706_at | NM_031062 | 81726 | mevalonate (diphospho) decarboxylase | Rn.10288 |
| 1071 | 78811 | U53873cds_at | U53873 | | | |
| 1072 | 78812 | U53927_at | NM_022619 | 64554 | solute carrier family 7 (cationic amino acid transporter, y+ system), member 2 | Rn.48707 |
| 1073 | 80031 | U55836_at | NM_031089 | 81753 | parathyroid hormone receptor 2 | Rn.10601 |
| 1074 | 82684 | U55938_at | NM_013029 | 25547 | sialyltransferase 8 C | Rn.90977 |
| 1075 | 79994 | U56815_at | NM_031665 | 60562 | syntaxin 6 | Rn.100217 |
| 1076 | 82484 | U56839_at | NM_017255 | 29597 | purinergic receptor P2Y, G-protein coupled 2 | Rn.11102 |
| 1077 | 79952 | U57049_at | U57049 | 81724 | 5,10-methylenetetrahydrofolate reductase | Rn.10494 |
| 1078 | 82524 | U57062_at | NM_134332 | 171290 | granzyme C | Rn.88335 |
| 1079 | 79982 | U57063_at | NM_153466 | 266704 | natural killer cell protease 7 | Rn.10534 |
| 1080 | 82577 | U59241_at | NM_013044 | 25566 | tropomodulin 1 | Rn.1646 |
| 1081 | 79961 | U59672_at | NM_024394 | 79246 | 5-hydroxytryptamine (serotonin) receptor 3a | Rn.55109 |
| 1082 | 78834 | U62635_s_at | NM_022529 | 64360 | mitochondrial ribosomal protein L23 | Rn.1608 |
| 1083 | 80063 | U62667_at | NM_031123 | 81801 | stanniocalcin 1 | Rn.10647 |
| 1084 | 76779 | U62940_at | NM_024487 | 79563 | GrpE-like 1, mitochondrial | Rn.10630 |
| 1085 | 78836 | U63318_s_at | NM_139090 | 245921 | activin receptor-like kinase 7 | Rn.10580 |
| 1086 | 76927 | U64451_at | NM_013084 | 25618 | acyl-Coenzyme A dehydrogenase, short/branched chain | Rn.44423 |
| 1087 | 78838 | U64689_at | NM_053600 | 94269 | fasciculation and elongation protein zeta 2 (zygin II) | Rn.8714 |
| 1088 | 78839 | U64705cds_i_at | NM_001008335 | 303831 | eukaryotic translation initiation factor 4A2 (predicted) | Rn.104579 |
| 1089 | 82644 | U65656_at | NM_031054 | 81686 | matrix metallopeptidase 2 | Rn.6422 |
| 1090 | 78843 | U66292_at | NM_021677 | 59313 | pregnancy-specific beta 1-glycoprotein | Rn.42878 |
| 1091 | 78844 | U66293_at | U66293 | 292668 | pregnancy-specific beta 1-glycoprotein | Rn.44241 |
| 1092 | 78845 | U66298_at | NM_013107 | 25644 | bone morphogenetic protein 6 | Rn.40476 |
| 1093 | 80068 | U66322_at | NM_138863 | 192227 | leukotriene B4 12-hydroxydehydrogenase | Rn.10656 |
| 1094 | 80054 | U66478_at | NM_013130 | 25671 | SMAD, mothers against DPP homolog 1 (Drosophila) | Rn.10635 |
| 1095 | 80074 | U67082_at | NM_019620 | 25165 | zinc finger protein 386 (Kruppel-like) | Rn.10663 |
| 1096 | 78848 | U67207_s_at | NM_012596 | 24536 | leptin receptor | Rn.9891 |
| 1097 | 76789 | U69272_at | NM_013129 | 25670 | interleukin 15 | Rn.2490 |
| 1097 | 76790 | U69272_g_at | NM_013129 | 25670 | interleukin 15 | Rn.2490 |
| 1098 | 80122 | U69279_at | NM_053903 | 116683 | ephrin A5 | Rn.10714 |
| 1099 | 82847 | U70050_at | U70050 | 29147 | jagged 2 | Rn.22459 |
| 1100 | 76931 | U71089cds_at | NM_019310 | 54258 | interleukin 8 receptor, alpha | |
| 1101 | 82581 | U72660_at | NM_012867 | 25338 | ninjurin 1 | Rn.11245 |
| 1102 | 80319 | U72741_at | NM_012977 | 25476 | lectin, galactose binding, soluble 9 | Rn.10706 |
| 1102 | 80320 | U72741_g_at | NM_012977 | 25476 | lectin, galactose binding, soluble 9 | Rn.10706 |
| 1103 | 80181 | U72995_at | NM_053585 | 94193 | MAP-kinase activating death domain | Rn.90117 |
| 1104 | 78872 | U75412cds_at | U75412 | | | |
| 1105 | 76936 | U75899mRNA_at | NM_130431 | 161476 | heat shock 27 kD protein 2 | Rn.22486 |
| 1106 | 82650 | U75916_at | U75916 | 115769 | tight junction protein 2 | Rn.10965 |
| 1107 | 82651 | U75917_at | NM_022952 | 65046 | adaptor-related protein complex 2, sigma 1 subunit | Rn.37866 |
| 1108 | 78873 | U75920_at | NM_138509 | 114764 | microtubule-associated protein, RP/EB family, member 1 | Rn.7652 |
| 1109 | 78874 | U75921UTR#1_at | U75921 | | | |
| 1110 | 78875 | U75923cds_at | U75923 | 171557 | isoleucine-tRNA synthetase | |
| 1111 | 80287 | U77583_at | NM_053615 | 113927 | casein kinase 1, alpha 1 | Rn.23810 |
| 1112 | 78894 | U77829mRNA_i_at | U77829 | 81714 | growth arrest specific 5 | Rn.14733 |
| 1113 | 82606 | U77918_at | NM_031595 | 29677 | proteasome (prosome, macropain) 26S subunit, ATPase 3 | Rn.11173 |
| 1114 | 78895 | U77931_at | NM_147136 | 257642 | rRNA promoter binding protein | |
| 1115 | 78902 | U79568_s_at | NM_133289 | 78956 | sodium channel, voltage-gated, type 9, alpha polypeptide | Rn.88082 |
| 1116 | 78903 | U79661_at | NM_022203 | 60591 | calcium-activated potassium channel beta subunit | Rn.127785 |
| 1117 | 76822 | U80054_at | NM_031053 | 81685 | mutL homolog 1 (E. coli) | Rn.20391 |
| 1118 | 78905 | U81035_s_at | NM_053909 | 116690 | neurofascin | Rn.3048 |
| 1118 | 78906 | U81036_s_at | NM_053909 | 116690 | neurofascin | Rn.3048 |
| 1119 | 78907 | U81186_at | NM_032066 | 84013 | smooth muscle-specific 17 beta-hydroxysteroid dehydrogenase type 3 | Rn.2230 |
| 1120 | 82945 | U82591_at | NM_133525 | 171047 | chromosome 6 open reading frame 108 | Rn.6997 |
| 1121 | 82913 | U83230_at | NM_013217 | 26955 | afadin | Rn.58 |
| 1122 | 78914 | U83666_at | U83666 | 171576 | budding uninhibited by benzimidazoles 1 homolog, beta (S. cerevisiae) | Rn.49845 |
| 1123 | 78916 | U83880UTR#1_at | NM_012736 | 25062 | glycerol-3-phosphate dehydrogenase 2 | Rn.89705 |
| 1124 | 82640 | U83896_at | NM_053911 | 116692 | pleckstrin homology, Sec7 and coiled/coil domains 2 | Rn.3732 |
| 1125 | 78919 | U84727_at | NM_022398 | 64201 | 2-oxoglutarate carrier | Rn.853 |
| 1126 | 78921 | U85513_at | NM_031666 | 60567 | synaptotagmin X | Rn.74259 |
| 1127 | 78922 | U87305_at | NM_022206 | 60629 | unc-5 homolog A (C. elegans) | Rn.44433 |
| 1128 | 78923 | U87306_at | NM_022207 | 60630 | unc-5 homolog B (C. elegans) | Rn.34617 |
| 1129 | 82660 | U87983_at | NM_012964 | 25460 | hyaluronan mediated motility receptor | Rn.92304 |
| 1130 | 78933 | U90261UTR#1_g_at | NM_053360 | 84357 | SH3-domain kinase binding protein 1 | Rn.107226 |
| 1131 | 78936 | U90725_s_at | NM_172039 | 64474 | high density lipoprotein binding protein | Rn.8515 |
| 1132 | 78938 | U90829_g_at | NM_032072 | 84019 | amyloid beta precursor protein binding protein 1 | Rn.4279 |
| 1133 | 78942 | U92081mRNA_s_at | NM_019358 | 54320 | glycoprotein 38 | Rn.794 |
| 1134 | 80203 | U92564_g_at | NM_053583 | 94188 | Olf-1/EBF associated Zn finger protein Roaz | Rn.9981 |
| 1135 | 80300 | U92803_at | NM_078621 | 140473 | chemokine binding protein 2 | Rn.10771 |
| 1136 | 78945 | U93052_s_at | NM_031828 | 83731 | potassium large conductance calcium-activated channel, subfamily M, alpha | Rn.30616 |
| | | | | | member 1 | |
| 1137 | 80188 | U94330_at | NM_012870 | 25341 | tumor necrosis factor receptor superfamily, member 11b (osteoprotegerin) | Rn.9792 |
| 1138 | 82933 | U94904_s_at | NM_173143 | 286928 | abl-interactor 2 | Rn.11316 |
| 1139 | 78949 | U95001UTR#1_s_at | NM_053598 | 94267 | nudix (nucleoside diphosphate linked moiety X)-type motif 4 | Rn.8426 |
| 1140 | 80253 | U95178_s_at | NM_024159 | 79128 | disabled homolog 2 (Drosophila) | Rn.14763 |
| 1141 | 82570 | X02361_at | NM_012493 | 24177 | alpha-fetoprotein | Rn.9174 |
| 1142 | 76948 | X02904cds_s_at | NM_138974 | 29438 | glutathione S-transferase, pi 2 | Rn.87063 |
| 1143 | 82357 | X02918_at | NM_012998 | 25506 | prolyl 4-hydroxylase, beta polypeptide | Rn.4234 |
| 1144 | 78968 | X03914mergedCDS_UTR_at | X03914 | | | |
| 1145 | 82436 | X04070_at | NM_017251 | 29584 | gap junction membrane channel protein beta 1 | Rn.10444 |
| 1146 | 82384 | X05300_at | NM_013067 | 25596 | ribophorin I | Rn.4224 |
| 1147 | 78974 | X06150cds_at | NM_017084 | 25134 | glycine N-methyltransferase | Rn.11142 |
| 1148 | 76736 | X06827_at | NM_013168 | 25709 | hydroxymethylbilane synthase | Rn.11080 |
| 1149 | 78981 | X06832cds#2_s_at | NM_021655 | 24258 | chromogranin A | Rn.41024 |
| 1150 | 78982 | X06889cds_at | NM_013018 | 25531 | RAB3A, member RAS oncogene family | Rn.44409 |
| 1151 | 82354 | X06916_at | NM_012618 | 24615 | S100 calcium-binding protein A4 | Rn.504 |
| 1152 | 78984 | X06984cds_s_at | NM_012497 | 24191 | aldolase C, fructose-biphosphate | Rn.11211 |
| 1153 | 78986 | X07259cds_s_at | NM_153307 | 50549 | cytochrome P450, family 4, subfamily a, polypeptide 10 | Rn.92401 |
| 1154 | 79012 | X13905cds_g_at | NM_001008370 | 361706 | similar to Ras-related protein Rab-1B | Rn.105979 |
| 1155 | 76958 | X13933_s_at | NM_031969 | 24242 | calmodulin 1 | Rn.4166 |
| 1156 | 79025 | X14848cds#12_at | X14848 | | | |
| 1157 | 82350 | X15679_at | NM_173301 | 286960 | preprotrypsinogen IV | Rn.10387 |
| 1158 | 76963 | X15705cds_at | NM_021863 | 60460 | heat shock protein 2 | Rn.112579 |
| 1159 | 76722 | X16072_at | NM_012937 | 25422 | crystallin, beta B2 | Rn.10350 |
| 1160 | 79044 | X16623cds_s_at | X16623 | | | |
| 1161 | 79048 | X17053cds s_at | NM_031530 | 24770 | chemokine (C-C motif) ligand 2 | Rn.4772 |
| 1161 | 79049 | X17053mRNA_s_at | NM_031530 | 24770 | chemokine (C-C motif) ligand 2 | Rn.4772 |
| 1162 | 79051 | X17607cds_s_at | NM_012492 | 24176 | adrenergic receptor, beta 2 | Rn.10206 |
| 1163 | 79060 | X51706cds_at | NM_001007598 | 29257 | ribosomal protein L9 | Rn.107914 |
| 1164 | 79063 | X51781cds_s_at | NM_013023 | 25539 | retinal S-antigen | Rn.9856 |
| 1165 | 76971 | X53428cds_s_at | NM_032080 | 84027 | glycogen synthase kinase 3 beta | Rn.10426 |
| 1166 | 79080 | X53504cds_g_at | X53504 | | | |
| 1167 | 82282 | X53773_at | NM_031008 | 81637 | adaptor protein complex AP-2, alpha 2 subunit | Rn.34928 |
| 1168 | 82301 | X54510_at | NM_053602 | 94271 | ATP synthase, H+ transporting, mitochondrial F0 complex, subunit F6 | Rn.5790 |
| 1169 | 82312 | X54531mRNA_at | NM_080689 | 140694 | dynamin 1 | Rn.10354 |
| 1170 | 79087 | X54617mRNA_s_at | X54617 | | | |
| 1171 | 82349 | X54640_at | NM_012783 | 25246 | basigin | Rn.2269 |
| 1172 | 76974 | X54686cds_at | NM_021836 | 24517 | Jun-B oncogene | Rn.15806 |
| 1173 | 76750 | X54793_at | NM_022229 | 63868 | heat shock protein 1 (chaperonin) | Rn.102058 |
| 1174 | 79088 | X54798cds_at | X54798 | | | |
| 1175 | 76748 | X55286_at | NM_013134 | 25675 | 3-hydroxy-3-methylglutaryl-Coenzyme A reductase | Rn.9437 |
| 1176 | 82332 | X55660_at | NM_019331 | 54281 | proprotein convertase subtilisin/kexin type 3 | Rn.3220 |
| 1177 | 79929 | X55955_at | NM_012742 | 25098 | forkhead box A1 | Rn.10470 |
| 1178 | 79090 | X55986mRNA_s_at | NM_017281 | 29671 | proteasome (prosome, macropain) subunit, alpha type 4 | Rn.11076 |
| 1179 | 79095 | X56448mRNA_at | X56448 | 305103 | cell surface glycoprotein gp42 | Rn.73740 |
| 1180 | 82430 | X56546_at | NM_013103 | 25640 | transcription factor 2 | Rn.11342 |
| 1181 | 79104 | X57432cds_s_at | NM_031838 | 83789 | ribosomal protein S2 | Rn.2115 |
| 1182 | 79113 | X58465mRNA_at | X58465 | 25538 | ribosomal protein S5 | Rn.2100 |
| 1183 | 79115 | X58550mRNA_s_at | NM_012490 | 24163 | acrosin | Rn.10423 |
| 1184 | 82525 | X58828_at | NM_053990 | 117063 | protein tyrosine phosphatase, non-receptor type 2 | Rn.33497 |
| 1185 | 82361 | X58865mRNA_at | NM_013190 | 25741 | phosphofructokinase, liver, B-type | Rn.4212 |
| 1186 | 79118 | X59375mRNA_at | X59375 | | | |
| 1187 | 79123 | X59737mRNA_at | X59737 | 29593 | creatine kinase, mitochondrial 1, ubiquitous | Rn.24682 |
| 1187 | 79124 | X59737mRNA_g_at | X59737 | 29593 | creatine kinase, mitochondrial 1, ubiquitous | Rn.24682 |
| 1188 | 79127 | X59949cds_s_at | NM_052799 | 24598 | nitric oxide synthase 1, neuronal | Rn.10573 |
| 1189 | 82393 | X60212_i_at | NM_201415 | 291434 | ribosomal protein L17 | Rn.34429 |
| 1190 | 79132 | X60469mRNA_s_at | NM_080478 | 29722 | amyloid beta (A4) precursor protein-binding, family B, member 1 | Rn.19953 |
| 1191 | 79133 | X60651mRNA_s_at | NM_013026 | 25216 | syndecan 1 | Rn.11176 |
| 1192 | 79145 | X62145cds_at | X62145 | 26962 | ribosomal protein L8 | Rn.127774 |
| 1193 | 79149 | X62166cds_s_at | NM_198753 | 300079 | ribosomal protein L3 | Rn.107726 |
| 1194 | 79153 | X62325cds_f_at | X62325 | | | |
| 1195 | 79166 | X62950mRNA_f_at | X62950 | | | |
| 1196 | 79167 | X62951mRNA_s_at | X62951 | | | |
| 1197 | 79170 | X63369cds_at | NM_133290 | 79426 | zinc finger protein 36 | Rn.82737 |
| 1198 | 79824 | X66974_at | NM_053988 | 117059 | calbindin 2 | Rn.10321 |
| 1199 | 82287 | X67859_at | NM_031119 | 81783 | Sjogren syndrome antigen B | Rn.24494 |
| 1200 | 79893 | X68191_at | NM_019268 | 29715 | solute carrier family 8 (sodium/calcium exchanger), member 1 | Rn.118972 |
| 1201 | 76730 | X68199_at | NM_053986 | 117057 | myosin Ib | Rn.36339 |
| 1202 | 79182 | X70667cds_at | X70667 | 29310 | melanocortin 3 receptor | |
| 1203 | 82425 | X71898_at | NM_134352 | 50692 | plasminogen activator, urokinase receptor | Rn.82711 |
| 1204 | 76720 | X72757_g_at | X72757 | | | |
| 1205 | 82327 | X73371_at | NM_175756 | 289211 | Fc receptor, IgG, low affinity IIb | Rn.33323 |
| 1206 | 79185 | X73411mRNA_s_at | NM_130738 | 113938 | SNRPN upstream reading frame | Rn.11169 |
| 1207 | 79186 | X74227cds_at | NM_019312 | 54260 | inositol 1,4,5-trisphosphate 3-kinase B | Rn.44632 |
| 1208 | 82545 | X74549_at | NM_024382 | 79224 | serine (or cysteine) proteinase inhibitor, dade D, member 1 | Rn.10553 |
| 1209 | 76990 | X74565cds_at | NM_022516 | 29497 | polypyrimidine tract binding protein 1 | Rn.64440 |
| 1209 | 76991 | X74565cds_g_at | NM_022516 | 29497 | polypyrimidine tract binding protein 1 | Rn.64440 |
| 1210 | 82406 | X74593_at | NM_017052 | 24788 | sorbitol dehydrogenase | Rn.11334 |
| 1211 | 79189 | X74833cds_at | NM_012528 | 24261 | cholinergic receptor, nicotinic, beta polypeptide 1 (muscle) | Rn.44611 |
| 1212 | 79190 | X74834cds_s_at | NM_019145 | 25753 | cholinergic receptor, nicotinic, gamma polypeptide | Rn.44634 |
| 1213 | 79192 | X74836cds_s_at | NM_017194 | 29422 | cholinergic receptor, nicotinic, epsilon polypeptide | Rn.10301 |
| 1214 | 79193 | X74978exon_at | X74978 | | | |
| 1215 | 82414 | X75856_at | X75856 | 24822 | testis enhanced gene transcript | Rn.107678 |
| 1216 | 79196 | X76452cds_s_at | NM_001005871 | 29600 | ATPase, Ca++ transporting, plasma membrane 4 | Rn.9986 |
| 1217 | 79198 | X76489cds_at | X76489 | 24936 | CD9 antigen | Rn.2091 |
| 1217 | 79199 | X76489cds_g_at | X76489 | 24936 | CD9 antigen | Rn.2091 |
| 1218 | 80285 | X76724_at | NM_017304 | 29738 | potassium voltage-gated channel, shaker-related subfamily, beta member 2 | Rn.10757 |
| 1219 | 82466 | X76985_at | NM_031655 | 59073 | latexin | Rn.11404 |
| 1220 | 76791 | X77209_at | NM_212546 | 24963 | heat shock 70 kD protein 1-like | Rn.124580 |
| 1221 | 80024 | X77818_at | X77818 | | | |
| 1222 | 82548 | X78606_at | NM_053978 | 117049 | RAB28, member RAS oncogene family | Rn.4023 |
| 1223 | 76995 | X79081mRNA_f_at | NM_019184 | 29277 | Cytochrome P450, subfamily IIC (mephenytoin 4-hydroxylase) | Rn.10870 |
| 1224 | 82210 | X81193_at | NM_057144 | 117505 | cysteine-rich protein 3 | Rn.11345 |
| 1225 | 82331 | X82152_at | NM_080698 | 64507 | fibromodulin | Rn.8778 |
| 1226 | 82554 | X82396_at | NM_022597 | 64529 | cathepsin B | Rn.100909 |
| 1227 | 82392 | X82445_at | NM_017271 | 29648 | nuclear distribution gene C homolog (Aspergillus) | Rn.10413 |
| 1228 | 82223 | X83399_at | NM_053974 | 117045 | eukaryotic translation initiation factor 4E | Rn.11275 |
| 1229 | 79218 | X83585cds_s_at | NM_031602 | 29718 | potassium inwardly-rectifying channel, subfamily J, member 10 | Rn.10196 |
| 1230 | 79221 | X83735exon#3_at | NM_001008889 | 363982 | HIV-induced protein-7-like protease | Rn.60058 |
| 1231 | 79993 | X84210complete_seq_s_at | NM_012988 | 25492 | nuclear factor I/A | Rn.129702 |
| 1232 | 79223 | X86178mRNA_at | X86178 | | | |
| 1233 | 80097 | X86561cds#2_at | NM_001008724 | 361969 | fibrinogen, alpha polypeptide | Rn.98846 |
| 1234 | 79228 | X89695cds_at | NM_214821 | 252887 | olfactory receptor 1413 | Rn.92442 |
| 1235 | 79229 | X89696cds_at | NM_001000363 | 295917 | olfactory receptor 728 (predicted) | Rn.109351 |
| 1236 | 79239 | X89705cds_at | NM_001000502 | 305711 | olfactory receptor 1606 | Rn.115051 |
| 1237 | 82504 | X91234_at | NM_024391 | 79243 | hydroxysteroid (17-beta) dehydrogenase 2 | Rn.10515 |
| 1238 | 82239 | X92069_at | NM_080780 | 113995 | purinergic receptor P2X, ligand-gated ion channel, 5 | Rn.10257 |
| 1239 | 82558 | X92097_at | NM_031722 | 65165 | coated vesicle membrane protein | Rn.1022 |
| 1240 | 79250 | X93219cds_s_at | NM_012896 | 25370 | adenosine A3 receptor | Rn.10457 |
| 1241 | 79988 | X95188_at | NM_053339 | 83522 | acyl-Coenzyme A oxidase 3, pristanoyl | Rn.10546 |
| 1242 | 79256 | X95990exon_s_at | NM_053619 | 113959 | complement component 5, receptor 1 | Rn.10680 |
| 1243 | 79257 | X96437mRNA_at | NM_212505 | 294235 | immediate early response 3 | Rn.23638 |
| 1244 | 77005 | X98490cds_at | NM_021582 | 59102 | replication protein A2 | Rn.40389 |
| 1245 | 79264 | X98564cds_at | NM_021697 | 60326 | potassium channel, subfamily V, member 1 | Rn.42920 |
| 1246 | 79265 | X98746cds_at | NM_134329 | 171178 | alcohol dehydrogenase 7 (class IV), mu or sigma polypeptide | Rn.42935 |
| 1247 | 77006 | Y00156cds_f_at | NM_153314 | 266685 | UDP-glucuronosyltransferase 2B3 precursor, microsomal | Rn.24945 |
| 1248 | 77007 | Y00396mRNA_at | NM_012603 | 24577 | myelocytomatosis viral oncogene homolog (avian) | Rn.12072 |
| 1248 | 77008 | Y00396mRNA_g_at | NM_012603 | 24577 | myelocytomatosis viral oncogene homolog (avian) | Rn.12072 |
| 1249 | 79894 | Y00766_at | NM_013119 | 25657 | sodium channel, voltage-gated, type III, alpha polypeptide | Rn.87394 |
| 1250 | 79281 | Y08138_at | NM_022696 | 64637 | heart and neural crest derivatives expressed transcript 2 | Rn.41057 |
| 1251 | 79288 | Y09453cds_at | NM_019255 | 29658 | calcium channel, voltage-dependent, gamma subunit 1 | Rn.24079 |
| 1252 | 79291 | Y10823cds_s_at | NM_053762 | 114639 | zona pellucida glycoprotein 3 | Rn.10892 |
| 1253 | 79294 | Y11489cds_at | Y11489 | 57023 | a disintegrin and metalloprotease domain 5 | Rn.92321 |
| 1254 | 82731 | Y12635_at | NM_057213 | 117596 | ATPase, H+ transporting, V1 subunit B, isoform 2 | Rn.8109 |
| 1255 | 82853 | Y13714_at | NM_012656 | 24791 | secreted acidic cysteine rich glycoprotein | Rn.98989 |
| 1256 | 76378 | Y15068_at | NM_138911 | 192277 | stress-induced-phosphoprotein 1 (Hsp70/Hsp90-organizing protein) | Rn.22614 |
| 1257 | 79309 | Y17048_g_at | NM_133529 | 171051 | calcium binding protein 1 | Rn.23560 |
| 1258 | 79319 | Z11932cds_g_at | NM_019136 | 25108 | arginine vasopressin receptor 2 | Rn.44344 |
| 1259 | 79325 | Z14118cds_at | Z14118 | 25267 | platelet derived growth factor receptor, alpha polypeptide | Rn.55127 |
| 1259 | 79326 | Z14118cds_g_at | Z14118 | 25267 | platelet derived growth factor receptor, alpha polypeptide | Rn.55127 |
| 1260 | 79327 | Z14119cds_at | NM_031525 | 24629 | platelet derived growth factor receptor, beta polypeptide | Rn.98311 |
| 1261 | 82221 | Z36980_at | NM_024131 | 29318 | D-dopachrome tautomerase | Rn.3464 |
| 1262 | 79349 | Z83757mRNA_at | NM_017094 | 25235 | growth hormone receptor | Rn.2178 |
| 1263 | 79351 | Z83869cds_at | NM_021699 | 60328 | serine/threonine kinase | Rn.42926 |

TABLE 2

| | | | GenBank Acc or | General | Adrenergic Agonist | | Heart Failure | Myocardial Necrosis | Vasculature Agent |
|---|---|---|---|---|---|---|---|---|---|
| SEQ ID NO. | GLGC ID No. | Fragment Name | RefSeq ID No. | Model Weighting | Weighting | Arrhythmia Weighting | Weighting | Weighting | Weighting |
| 1 | 77058 | A03913cds_s_at | A03913 | | | | −0.018538216 | | |
| 2 | 77023 | AA684963_at | AA684963 | | | | | | 0.001491754 |
| 3 | 77024 | AA685112_at | AA685112 | | | | | | −0.023599712 |
| 4 | 77026 | AA685376_f_at | AA685376 | 0.008058474 | | | 0.071586746 | | |
| 5 | 77028 | AA685903_at | NM_001012197 | −0.006684589 | | | | | |
| 6 | 77029 | AA686031_at | NM_001005550 | 0.001231342 | | | | | |
| 7 | 77030 | AA686579_at | NM_001009672 | 0.006230062 | | | | | |
| 8 | 77032 | AA686870_f_at | AA686870 | | | | | | 0.003168987 |
| 9 | 82173 | AA799389_at | NM_031091 | 0.004974244 | | | | | |
| 9 | 82174 | AA799389_g_at | NM_031091 | 0.004582303 | | | | | |
| 10 | 82240 | AA801441_at | NM_031763 | −0.002660145 | | | | | |
| 11 | 77033 | AA819943_at | AA819943 | | | | | | −0.020429244 |
| 12 | 77036 | AA848421_at | AA848421 | −0.001585115 | | | | | |
| 13 | 77037 | AA848546_at | NM_001009542 | 0.013310136 | | | | | |
| 14 | 76160 | rc_AA818604_s_at | NM_212504 | −0.00156337 | 0.011510999 | 0.002767663 | | | |
| 14 | 76161 | AA848563_s_at | NM_212504 | −0.001433022 | | −0.011982835 | | | |
| 14 | 76534 | L16764_s_at | NM_212504 | 0.001445792 | | −0.014449423 | | −0.001452264 | |
| 14 | 76766 | Z75029_s_at | NM_212504 | | | −0.010560855 | | 0.000952824 | |
| 14 | 79333 | Z27118cds_s_at | NM_212504 | | | | | −0.002029624 | |
| 15 | 77039 | AA875509_at | AA875509 | 0.009278474 | | | 0.112712422 | | |
| 16 | 80380 | AB000098_at | NM_022607 | 0.005050612 | | | | | |
| 17 | 80197 | AB000113_at | NM_017217 | 0.004698301 | | | | | |
| 18 | 82747 | AB000216_at | NM_134403 | | | | | | 0.0023802 |
| 19 | 80386 | AB000928_at | NM_053509 | 0.00145853 | | | | | |
| 20 | 77074 | AB001982_g_at | NM_032075 | −0.000167872 | | | | | |
| 21 | 77078 | AB002561_at | NM_021867 | 0.007770658 | | | | | |
| 22 | 77080 | AB003357_at | NM_019349 | −0.006052063 | | | | | |
| 23 | 77082 | AB003478_g_at | NM_133553 | 0.00043827 | | | | | |
| 24 | 82743 | AB003515_at | NM_022706 | 0.005752919 | | | | | |
| 25 | 77204 | AB017140_at | NM_031707 | −0.001689151 | | | −0.026640117 | | |
| 25 | 77607 | AF093268_s_at | NM_031707 | 0.000491799 | | | | | |
| 25 | 80343 | AB003726_at | NM_031707 | | 0.114024028 | | | | |
| 26 | 77083 | AB003753cds#1_at | AB003753 | 0.012466003 | | | | | |
| 27 | 77099 | AB005541_at | AB005541 | −0.005360927 | | | | | |
| 28 | 82881 | AB006138_at | NM_031635 | −0.002661354 | | | | | |
| 29 | 82878 | AB006450_at | NM_019351 | −0.008442076 | | | | | |
| 30 | 82879 | AB006451_at | NM_019352 | −0.004663793 | | | | | |
| 31 | 77104 | AB006710_s_at | NM_057135 | −0.004059713 | | | | | |
| 32 | 77105 | AB006802_at | AB006802 | 0.00247942 | | | | | |
| 33 | 77107 | AB006881mRNA_at | NM_147207 | 0.004993242 | | | | | |
| 34 | 77111 | AB007689_at | NM_053309 | 0.003245644 | | | | | |
| 35 | 82920 | AB008538_at | NM_031753 | 0.012199748 | | | | | |
| 36 | 77135 | AB010154_at | NM_147135 | 0.00478207 | | | | | |
| 37 | 77141 | AB010963_s_at | NM_019273 | 0.004754986 | | | | | |
| 38 | 77155 | AB011679_at | NM_173102 | −0.004758425 | 0.102641129 | | | | |
| 38 | 83224 | rc_AA860030_s_at | NM_173102 | | −0.041422868 | | | 0.011681688 | |
| 39 | 80155 | AB012233_at | AB012233 | 0.001086748 | | | | | |
| 40 | 80157 | AB012234_g_at | AB012234 | | | | | 0.015986643 | |
| 41 | 77161 | AB012600_s_at | NM_024362 | 0.010201774 | | | | | |
| 41 | 82819 | AF015953_at | NM_024362 | 0.008783736 | | | | | |
| 42 | 77162 | AB012933_at | NM_053607 | −0.00303289 | | | | | |
| 43 | 77171 | AB013453_at | NM_013030 | −0.006240329 | | | | | |
| 43 | 77173 | AB013455_at | NM_013030 | 0.004830261 | | | | | |
| 44 | 77172 | AB013454_at | AB013454 | 0.007417977 | | | | | |
| 45 | 77178 | AB015191_at | NM_022505 | 0.003243161 | | | | | |
| 45 | 77179 | AB015191_g_at | NM_022505 | −0.00132699 | | | | | |
| 46 | 77190 | AB015946_s_at | NM_145778 | | | | | | −0.037279404 |
| 47 | 77200 | AB016536_s_at | NM_031330 | −0.010500753 | | | | | |
| 47 | 81530 | rc_AI104524_s_at | NM_031330 | −0.006228102 | | | | | |
| 48 | 77202 | AB017044exon_at | AB017044 | 0.000776987 | | | | | |
| 49 | 77206 | AB017170_s_at | NM_022953 | 0.004949339 | | | | | |
| 50 | 77215 | AB017711_at | NM_031335 | 0.00542016 | | | | | |
| 51 | 77228 | AB020504_g_at | AB020504 | | | | | | 0.020335337 |
| 52 | 77235 | AF000900_at | NM_139091 | | 0.03862251 | | | | |
| 52 | 81017 | rc_AA891045_at | NM_139091 | −0.005187068 | | 0.006437078 | | | |
| 53 | 77239 | AF000943_at | NM_022208 | 6.23E−05 | | | | | |
| 54 | 76391 | AF003523_s_at | NM_022698 | −0.000863097 | | | | | |
| 55 | 77247 | AF004218_s_at | NM_030996 | −0.006820798 | | | | | |
| 56 | 82857 | AF004811_at | NM_030863 | | 0.035814293 | | | | |
| 57 | 77252 | AF008912_at | AF008912 | 0.002589073 | | | | | |
| 58 | 77253 | AF009656mRNA_s_at | NM_012583 | −0.001211495 | | | | | |
| 59 | 82942 | AF014503_at | NM_053611 | | | | | | −0.032310481 |
| 60 | 80323 | AF016179_at | NM_173315 | 0.010186836 | | | | | |
| 61 | 80326 | AF016182_at | NM_173130 | 0.002029218 | | | | | |
| 62 | 77270 | AF018261_at | NM_057136 | | −0.016044391 | | | | |
| 63 | 77271 | AF019624_at | NM_019151 | −0.003928311 | | | | | |
| 64 | 77275 | AF020046_s_at | NM_031768 | 0.00346581 | | | | | |
| 65 | 77276 | AF020210_s_at | NM_053655 | 0.004687364 | | | | | |
| 65 | 77277 | AF020211_s_at | NM_053655 | −0.004012326 | | | | | |
| 66 | 78927 | U88324_at | NM_030987 | 0.004373243 | | | | | |
| 66 | 82918 | AF022083_s_at | NM_030987 | −0.000577858 | | | | | |
| 67 | 76834 | AF022729_at | NM_080397 | −0.000303281 | | | | | |
| 68 | 77284 | AF022742cds_at | NM_031771 | 0.007048985 | | | | | |
| 69 | 82949 | AF022774_g_at | NM_133591 | 0.003323409 | | | | | |
| 70 | 77286 | AF022952_at | AF022952 | | 0.044178164 | | | | |
| 71 | 77287 | AF023087_s_at | NM_012551 | | 0.045546088 | | | | |
| 71 | 78865 | U75397UTR#1_s_at | NM_012551 | | 0.005987095 | | | −0.002966072 | |
| 72 | 77289 | AF023621_at | AF023621 | 0.007952494 | | | | | |
| 73 | 77291 | AF025671_s_at | NM_022522 | 0.007926221 | 0.016222954 | | | | |
| 74 | 80347 | AF026476_at | NM_031777 | | | | | 0.021557864 | |
| 75 | 80348 | AF026529_s_at | AF026529 | | | | | | −0.010439504 |
| 76 | 77293 | AF027188UTR#1_at | AF027188 | | | | | | 0.000302847 |
| 77 | 77295 | AF027571_s_at | NM_024353 | −0.002132984 | | | | | |
| 78 | 77298 | AF028784mRNA#1_s_at | AF028784 | −0.004307178 | | −0.028755557 | | | |
| 79 | 77300 | AF029357cds_at | NM_001000583 | | | | | −0.005808993 | |
| 80 | 77309 | AF030091UTR#1_g_at | NM_053662 | −0.006896238 | | | | | |
| 81 | 77312 | AF030358_g_at | NM_134455 | | | | | | −0.013858595 |
| 82 | 82963 | AF032668_at | NM_019277 | 0.004905557 | | | | | −0.013052396 |
| 83 | 82964 | AF032669_at | NM_139043 | 0.00862072 | | | | | |
| 84 | 77331 | AF034896_f_at | NM_206850 | 0.002824944 | | | | | |
| 85 | 77336 | AF035632_s_at | NM_022939 | 0.004864385 | | | | | |
| 86 | 77339 | AF035952_at | AF035952 | −0.00633573 | | | | | |
| 87 | 77349 | AF036959_at | NM_031787 | −0.000127287 | | | | | |
| 87 | 83287 | rc_AA866455_at | NM_031787 | −0.007503903 | | | | | |
| 88 | 82705 | AF037071_at | NM_138922 | | | | | 0.001848547 | |
| 89 | 80689 | rc_AI639215_at | NM_131913 | −0.00680676 | | −0.030878931 | | | |
| 89 | 82946 | AF038591_at | NM_131913 | 0.002973849 | | | | | 0.05089182 |
| 90 | 80379 | AF039085_at | NM_053553 | | | | 0.003234098 | | |
| 91 | 77354 | AF039308_at | AF039308 | 0.004817531 | | −0.008588927 | | | |
| 92 | 82951 | AF040954_at | NM_022951 | 0.005034157 | | | | | |
| 93 | 80384 | AF041107_g_at | AF041107 | −0.001433491 | | | | | |
| 94 | 77374 | AF044574_at | NM_171996 | −5.25E−05 | | | | | |
| 95 | 82965 | AF044910_at | NM_022509 | | | | | −0.004745544 | |
| 96 | 77380 | AF048828_at | NM_031353 | −0.000179311 | | | | | |
| 96 | 77381 | AF048828_g_at | NM_031353 | | | | −0.055135779 | | |
| 97 | 77385 | AF050214_at | AF050214 | −0.009972814 | | | | | |
| 98 | 77389 | AF050662UTR#1_at | NM_031593 | 0.004343287 | | | | | |
| 98 | 77428 | AF060174_at | NM_031593 | −6.98E−05 | | | | | |
| 99 | 77395 | AF051895_at | NM_013132 | −0.000999555 | | | | | |
| 100 | 77406 | AF053938_s_at | NM_181092 | −0.000529235 | | | | | |
| 101 | 80160 | AF053987_at | AF053987 | −0.007180778 | | | | | |
| 102 | 80164 | AF053991_at | NM_173318 | −0.006955284 | | | | | |
| 103 | 77414 | AF055667mRNA_at | AF055667 | −0.005961157 | | | | | |
| 104 | 77420 | AF056324_at | NM_022394 | −0.005866951 | | | | | |
| 104 | 77421 | AF056324_g_at | NM_022394 | 7.70E−06 | | | | | |
| 105 | 80256 | AF059258_at | NM_031744 | | | | | 0.006168868 | |
| 106 | 82798 | AF059530_at | NM_053557 | | | | −0.019917649 | | |
| 107 | 77438 | AF061947_g_at | NM_053575 | 3.08E−06 | | | | | |
| 108 | 77441 | AF062594_g_at | NM_053561 | −0.002522543 | | | | | |
| 109 | 77445 | AF062741_g_at | NM_145091 | 0.007851302 | 0.010269134 | | | | |
| 110 | 77450 | AF063249_at | NM_022925 | −0.002775662 | | | | | |
| 111 | 82806 | AF063447_at | NM_053563 | | | | | 0.00536819 | |
| 112 | 76776 | U69109_s_at | NM_017318 | −0.003541072 | | | | | |
| 112 | 77453 | AF063890_s_at | NM_017318 | 0.007270182 | | | | | |
| 113 | 77456 | AF064868_g_at | NM_024163 | 0.003108745 | | | | | |
| 114 | 77460 | AF065387_at | NM_031756 | 0.001651406 | | | | 0.021964531 | |
| 115 | 77473 | AF071014mRNA_s_at | NM_024483 | | −0.020616989 | | | | |
| 116 | 77480 | AF072892_s_at | AF072892 | 0.00026861 | | | | | |
| 117 | 77481 | AF072935_at | NM_022692 | 0.00245029 | | | | | |
| 118 | 77483 | AF073891_at | NM_133610 | 0.000238637 | | | | | |
| 119 | 77491 | AF076183_at | NM_134406 | 0.016132894 | | | | | |
| 119 | 77493 | AF076184_at | NM_134406 | −0.004070203 | | | | | |
| 120 | 77494 | AF076619_at | NM_031623 | −0.005929911 | | | | | |
| 121 | 77496 | AF077000_at | NM_057204 | 0.014938977 | | | | | |
| 121 | 77497 | AF077000_g_at | NM_057204 | 0.002639806 | | | | | |
| 122 | 77507 | AF079864_at | NM_173293 | | 0.002053728 | | | | |
| 123 | 77518 | AF081196_at | NM_019211 | −0.005127961 | | | | | |
| 124 | 77530 | AF083269_at | NM_019289 | −0.003163393 | | | | 0.019143438 | |
| 124 | 77531 | AF083269_g_at | M_019289 | −0.003452801 | | | | | |
| 125 | 77537 | AF084576_at | NM_053666 | 0.003383415 | | | | | |
| 126 | 77546 | AF087037_g_at | NM_019290 | 0.001495773 | | | | | |
| 127 | 77548 | AF087431_g_at | NM_031749 | 0.002710741 | | | | | |
| 128 | 77551 | AF087454_at | NM_031597 | | 0.008709922 | | | | |
| 129 | 77565 | AF090113_at | NM_138535 | −0.003243871 | | | | | |
| 130 | 77572 | AF090306_s_at | NM_031816 | −0.007956647 | | | | | |
| 131 | 77576 | AF091561_at | NM_001000504 | | 0.033958369 | | | | |
| 132 | 77577 | AF091562_s_at | NM_001000507 | 0.0018365 | | | | | |
| 133 | 77582 | AF091566_f_at | NM_001006598 | | | | | 0.002484912 | |
| 134 | 77583 | AF091567_s_at | NM_001000724 | 0.003349821 | | | | | |
| 135 | 77591 | AF091577_at | NM_001000979 | 0.014847884 | | | | | |
| 136 | 77595 | AF091580_s_at | AF091580 | 0.000102834 | | | | | |
| 137 | 77603 | AF092523_s_at | NM_053665 | 0.000802342 | | | | | |
| 138 | 77625 | AF099093_g_at | NM_022690 | −0.003399134 | | | | | |
| 139 | 77643 | AJ000347_g_at | NM_171990 | −0.00259151 | | | | | |
| 140 | 80387 | AJ000485_at | NM_021997 | −0.003017347 | | | | | |
| 141 | 77645 | AJ000557cds_s_at | NM_031514 | −0.003608013 | | | | | |
| 141 | 78719 | U13396_g_at | NM_031514 | −0.008191915 | | | | | |
| 142 | 77648 | AJ001290cds_at | NM_053715 | 0.010299894 | | | | | |
| 143 | 77649 | AJ001517cds_at | NM_053301 | 0.007574458 | | | | | |
| 144 | 77651 | AJ001637cds_at | NM_013004 | 0.003912607 | | | | | |
| 145 | 76426 | AJ002942cds_at | AJ002942 | 0.001515852 | | | | | |
| 146 | 77660 | AJ004858_at | NM_053349 | 0.000717469 | | | | | |
| 147 | 77666 | AJ005394_at | NM_134452 | | | | | | 0.034821389 |
| 147 | 83143 | rc_AA859757_g_at | NM_134452 | 0.000952327 | | | | | |
| 148 | 77670 | AJ005984_at | NM_021842 | 0.002768801 | | | | | |
| 149 | 76430 | AJ006070_at | AJ006070 | 0.003561314 | | | | | |
| 150 | 77676 | AJ006519_at | NM_024154 | | −0.021337478 | | | | |
| 151 | 77684 | AJ007291_at | NM_057143 | 0.002229149 | | | | | |
| 151 | 77685 | AJ007291_g_at | NM_057143 | −0.004291246 | | | 0.020686076 | | |
| 152 | 77686 | AJ007422_s_at | NM_133567 | 0.006043464 | | | | | |
| 153 | 77690 | AJ007632_s_at | NM_145095 | 0.001364274 | | | | | |
| 154 | 77699 | AJ011115_g_at | NM_021838 | −0.001564234 | | | | | |
| 154 | 77700 | AJ011116_at | NM_021838 | | 0.06143741 | | | | |
| 155 | 77704 | AJ011606_at | NM_053480 | 0.007626935 | | | | | |
| 156 | 77708 | AJ011656cds_s_at | NM_031700 | | −0.04170253 | | | | |
| 156 | 81868 | M74067_at | NM_031700 | 0.000654705 | | | | | |
| 157 | 77709 | AJ011811_at | AJ011811 | | 0.012905176 | | | | 0.022722704 |
| 158 | 77713 | AJ012603cds_at | NM_020306 | 0.000355205 | | | | | |
| 158 | 77714 | AJ012603UTR#1_at | NM_020306 | 0.003621376 | | | | | |
| 158 | 77715 | AJ012603UTR#1_g_at | NM_020306 | 0.000758627 | | | | | |
| 159 | 76433 | AJ223083_at | AJ223083 | 0.00750333 | | | | | |
| 160 | 77725 | AJ223355_at | NM_133418 | −0.010217123 | | | | | |
| 161 | 76815 | AJ224120_at | NM_053487 | −0.003491567 | | | | | |
| 162 | 77728 | D00092_s_at | D00092 | −0.007939132 | | | | | |
| 163 | 76780 | D00569_at | NM_057197 | 0.001631629 | | | | | |
| 163 | 76781 | D00569_g_at | NM_057197 | 0.010701378 | | | | | |
| 164 | 79889 | D00634_at | NM_012701 | 0.004258233 | | | | | |
| 165 | 76114 | rc_AI229440_s_at | NM_138877 | −0.013972483 | | | | | |
| 165 | 77732 | D00636cds_s_at | NM_138877 | −0.00237716 | | | | | |
| 166 | 76441 | D00688_s_at | D00688 | 0.001134684 | | | | | |
| 167 | 79598 | D00729_at | NM_017306 | −0.001382011 | | | | | |
| 168 | 81799 | D00753_at | NM_031531 | 0.000473488 | | | | | |
| 169 | 77738 | D01046_at | NM_032617 | | | | 0.018439179 | | |
| 170 | 82782 | D10233_g_at | NM_031095 | 0.004545741 | | | | | |
| 171 | 82255 | D10262_at | NM_017127 | | | | −0.00133593 | | |
| 172 | 77749 | D10693_at | NM_031044 | −0.001281149 | | −0.002414368 | | | |
| 173 | 77751 | D10699_g_at | NM_017237 | 0.000713608 | | | | | |
| 174 | 77759 | D10755_s_at | NM_017283 | 0.00460428 | | | | | |
| 175 | 77765 | D10853_at | D10853 | 0.003515636 | | | | | |
| 176 | 77769 | D10952_i_at | NM_053586 | | | | | | 0.042560982 |
| 177 | 77771 | D11445exon#1-4_s_at | NM_030845 | −0.001220281 | | | | | |
| 178 | 77781 | D12771_s_at | NM_057102 | | | | | | −0.011525699 |
| 179 | 77785 | D12978cds_s_at | D12978 | 0.012786587 | | | | | |
| 180 | 77786 | D13120_s_at | NM_019383 | | | | | | −0.037057941 |
| 181 | 77787 | D13122_i_at | NM_012915 | | | | | | −0.019450928 |
| 182 | 77790 | D13124_s_at | NM_133556 | | | | | | 0.005764352 |
| 183 | 77796 | D13309_s_at | NM_031563 | 0.007794571 | | | | 0.003285658 | |
| 184 | 82850 | D13376_at | NM_024349 | | | | 0.09076439 | | |
| 185 | 77798 | D13417_g_at | NM_024360 | 0.00053338 | | | | | 0.002419642 |
| 186 | 82035 | D13518_at | NM_012764 | 0.011310205 | | | | | |
| 187 | 77800 | D13556exon_at | D13556 | −0.004844821 | | | | | |
| 188 | 77801 | D13623_at | NM_001008280 | | −0.047655043 | | | 0.001217751 | |
| 189 | 82985 | D13907_g_at | NM_022395 | 0.002235026 | | | | | |
| 190 | 77807 | D13927_at | NM_053327 | | −0.008496145 | | | | |
| 190 | 77808 | D13927_g_at | NM_053327 | −0.001908254 | | | | | |
| 191 | 77810 | D13962_g_at | NM_017102 | −0.004090417 | | | | 0.003139048 | |
| 192 | 77811 | D13963_at | NM_022920 | | −0.048070463 | | | | |
| 193 | 77816 | D13985_g_at | NM_031719 | −0.001987018 | | 0.024037661 | | | |
| 193 | 81481 | rc_AI169005_at | NM_031719 | | | | | | 0.00985428 |
| 194 | 76448 | D14014_g_at | NM_171992 | 0.006148286 | | | | | |
| 195 | 77817 | D14029_at | NM_019236 | 0.001254016 | | | | | |
| 196 | 77819 | D14048_g_at | NM_057139 | −0.000966768 | | | | | |
| 197 | 82979 | D14076_at | NM_138538 | −0.010680186 | | | | | |
| 198 | 77828 | D14568_at | NM_017309 | 0.006605262 | | | | | |
| 199 | 82030 | D16302_at | NM_030861 | 0.010925422 | | | | | |
| 200 | 77839 | D16443_at | NM_012704 | −0.001676701 | 0.006211864 | | | | |
| 200 | 77840 | D16443_g_at | NM_012704 | | 0.060318033 | | | | |
| 201 | 77842 | D16817_g_at | NM_031040 | 0.000528128 | 0.031843979 | | | | |
| 202 | 82056 | D17614_at | NM_013053 | 0.012679842 | | | | | |
| 203 | 76462 | D21799_g_at | NM_017284 | 0.004978004 | | | | | |
| 204 | 77855 | D21869_s_at | NM_031715 | −0.003132416 | | | | | |
| 205 | 76463 | D25233UTR#1_at | D25233 | 0.001600213 | | | | | |
| 206 | 77861 | D26111_s_at | NM_173103 | −0.005564416 | | | | | |
| 207 | 77865 | D26393exon_s_at | D26393 | 0.009973904 | | | | | |
| 208 | 82419 | D26439_at | NM_017079 | 0.001243411 | | | | | |
| 209 | 77881 | D28111_g_at | NM_012720 | | | | | −0.017318385 | |
| 210 | 77883 | D28512_at | NM_019122 | −0.002647772 | | −0.016693169 | | | |
| 211 | 76467 | D28754_s_at | NM_199501 | −0.007269151 | | | | | |
| 212 | 82751 | D29646_at | NM_013127 | −0.006755851 | | | | | |
| 213 | 82152 | D29683_at | NM_053596 | −0.011403734 | | | | | −0.014227333 |
| 214 | 77893 | D29766cds#1_s_at | NM_012931 | −0.000856552 | 0.008057124 | −0.025576348 | | −0.007744507 | |
| 215 | 77896 | D30649mRNA_s_at | NM_019370 | 0.008440336 | | | | | |
| 216 | 82555 | D30735_at | NM_013222 | 0.004002481 | | | | | |
| 217 | 82531 | D37920_at | NM_017136 | | | | −0.021102309 | | |
| 218 | 79730 | D37934_at | D37934 | −0.001086162 | | 0.014576578 | | | |
| 219 | 77914 | D38036_at | D38036 | | | | | −0.00436745 | |
| 220 | 77916 | D38061exon_s_at | NM_057105 | 0.009027092 | | | | | |
| 220 | 78466 | S56937_s_at | NM_057105 | −0.010166739 | | | | | |
| 221 | 77918 | D38063exon_at | NM_175846 | 0.004146659 | | | −0.079159195 | | |
| 222 | 77921 | D38067exon_at | D38067 | 0.001421149 | | | | | |
| 223 | 82871 | D38468_s_at | NM_013016 | 0.005293822 | | | | | |
| 224 | 77926 | D38494_at | NM_017292 | −0.003429219 | | | | | |
| 225 | 77929 | D42116_s_at | NM_001005330 | | −0.026427587 | | | | |
| 225 | 82202 | L36532_s_at | NM_001005330 | 0.016035281 | | | | | |
| 226 | 77931 | D42148_at | NM_057100 | | | | | 0.014581256 | |
| 227 | 77938 | D45247_at | D45247 | 0.00024457 | | | | | |
| 227 | 77939 | D45247_g_at | D45247 | −0.005193357 | | | | | |
| 228 | 77945 | D45254_g_at | NM_022598 | −0.004456726 | | | | | |
| 229 | 79794 | D45413_at | D45413 | −0.004736458 | | | | | |
| 230 | 77948 | D45862_g_at | NM_013076 | −0.001306147 | | 0.008026127 | | | |
| 231 | 82654 | D49434_at | D49434 | 0.008700115 | | | | | |
| 232 | 80069 | D50093_s_at | NM_012631 | 0.009290906 | | | | | |
| 233 | 81357 | rc_AI044488_at | NM_017126 | 0.009068835 | | | | | |
| 233 | 82653 | D50436_at | NM_017126 | 0.007602032 | | 0.004478737 | | | |
| 234 | 82514 | D50694_at | NM_033236 | −0.001414045 | | | 0.030202167 | | |
| 235 | 82516 | D50695_at | NM_057122 | | | | | | 0.029237364 |
| 236 | 82515 | D50696_at | NM_057123 | 0.00183357 | | | −0.012550288 | | |
| 237 | 76786 | D63673_at | NM_057125 | | | | | | −0.032436238 |
| 238 | 76837 | D63761_g_at | NM_024153 | 0.004599496 | | | | | |
| 239 | 82703 | D63772_at | NM_013032 | 0.004117885 | | | | | |
| 240 | 80296 | D64046_g_at | NM_022185 | −0.01577066 | | | | | |
| 241 | 82225 | D64050_at | NM_053594 | 0.009049812 | | | | | |
| 242 | 77970 | D64085_g_at | NM_022211 | −0.005364785 | | | | | 0.013693781 |
| 243 | 80129 | D82868_at | NM_019326 | | | | | −0.012600727 | |
| 244 | 82508 | D83349_at | NM_019161 | −0.002097485 | | | | | |
| 245 | 79979 | D83598_at | NM_013040 | 0.000731827 | | | | | |
| 246 | 77984 | D84485_at | D84485 | −0.002943732 | | | | | |
| 247 | 82892 | D85189_at | NM_053623 | | −0.046112893 | | | | |
| 248 | 77988 | D85435_at | NM_134449 | 0.010695869 | | 0.051905957 | | | |
| 248 | 77989 | D85435_g_at | NM_134449 | 0.009386937 | | | | | |
| 249 | 76759 | D86215_at | NM_012985 | | | | | | −0.007449511 |
| 250 | 82830 | D86711_at | D86711 | | | | | | 0.021907979 |
| 251 | 77993 | D86745cds_s_at | NM_057133 | 0.009428658 | | | | | |
| 252 | 82643 | D87515_at | NM_031097 | 0.004228841 | | | | | |
| 253 | 80119 | D87748_at | NM_017179 | 0.001949845 | | | | | |
| 254 | 77996 | D87922exon_at | D87922 | 0.005995075 | | | | | |
| 255 | 77997 | D87991_at | NM_199081 | −0.00267491 | | | | | |
| 255 | 77998 | D87991_g_at | NM_199081 | | 0.027361048 | | | | |
| 256 | 82666 | D88666_at | NM_138882 | | 0.013429142 | | | | −0.010783958 |
| 257 | 80060 | D88751_at | NM_013100 | −0.00352483 | | | | | |
| 258 | 76489 | D89069_f_at | NM_019170 | −0.001933053 | | | | | |
| 258 | 82598 | X95986mRNA#1_f_at | NM_019170 | | | | 0.074714996 | | |
| 259 | 76490 | D89070cds_s_at | D89070 | 0.002332397 | | | | | |
| 260 | 82923 | D89983_at | NM_022585 | | | 0.035978876 | | | |
| 261 | 81175 | rc_AA946532_at | NM_012804 | 0.006521719 | | | | | −0.035885661 |
| 261 | 82757 | D90038_at | NM_012804 | −0.000948729 | | | | | |
| 262 | 78004 | D90258_s_at | NM_017280 | −0.006031789 | | | | | |
| 263 | 78005 | D90265_s_at | NM_017278 | | | | 0.035172715 | | |
| 264 | 78009 | D90404_g_at | NM_017097 | | | | | | −0.010860794 |
| 265 | 79398 | E00988mRNA_s_at | NM_031511 | 0.000299257 | | | | | |
| 266 | 76108 | rc_AI137856_s_at | NM_031576 | | | | | | 0.029517982 |
| 266 | 76549 | M10068mRNA_s_at | NM_031576 | 0.015160143 | | | | | −0.007663248 |
| 266 | 79394 | E01524cds_s_at | NM_031576 | | | | | | −0.012054547 |
| 267 | 79390 | E01884cds_s_at | NM_031512 | 0.005033183 | | | | | |
| 268 | 79388 | E02223cds_f_at | NM_012548 | | | −0.000905346 | | | |
| 269 | 76498 | E03344cds_s_at | NM_017234 | −0.009437422 | | | | | |
| 270 | 79380 | E03424cds_s_at | NM_024356 | | 0.045010987 | | | | |
| 271 | 79366 | E12275cds_s_at | NM_031049 | 0.003068308 | | | | | |
| 272 | 79363 | E12625cds_at | NM_080886 | 0.010305935 | | | | | 0.026668246 |
| 273 | 79358 | E13541cds_s_at | NM_019284 | −0.006413546 | | | | | |
| 274 | 79356 | E13573cds_s_at | NM_057130 | 0.005955648 | | | | | |
| 275 | 79354 | E13732cds_at | NM_020542 | | −0.038950845 | | | | |
| 276 | 76501 | J00728cds_f_at | J00728 | 0.002236485 | | | | | |
| 277 | 78012 | J00735_g_at | NM_012559 | | 0.011157745 | | | 0.008551993 | |
| 277 | 78973 | X05861exon#1-6_s_at | NM_012559 | | −0.036754803 | | | 0.005752955 | |
| 278 | 78017 | J00776cds_s_at | NM_207593 | −0.010772462 | | | | | |
| 279 | 78025 | J02596cds_g_at | NM_012501 | | 0.014397979 | | | | |
| 280 | 79531 | J02675_at | NM_013024 | 0.004383291 | | | | | |
| 281 | 76104 | J02679_s_at | NM_017000 | | | | 0.053294428 | | |
| 282 | 82783 | J02962_at | NM_031832 | 5.12E−05 | | | | | |
| 283 | 78027 | J02998_at | NM_031090 | −0.00552552 | | | | | |
| 284 | 78998 | X08056cds_s_at | NM_012793 | 0.000829584 | | | | | |
| 284 | 83017 | J03588_at | NM_012793 | 0.001062133 | | | | | |
| 285 | 82029 | J03819_at | NM_012672 | 0.001455781 | | | | | |
| 286 | 82766 | J04024_at | NM_017290 | | | | −0.068880859 | | |
| 287 | 82122 | J04197_i_at | NM_012621 | | | | −0.07241485 | | |
| 288 | 79491 | J04503_at | NM_017038 | | | | −0.019278311 | | |
| 289 | 81903 | J04532_at | NM_022507 | 0.003401504 | | | | | |
| 290 | 78277 | M25350_s_at | NM_017031 | | −0.03411663 | | | | |
| 290 | 82065 | J04563_at | NM_017031 | | −0.023095916 | | | | |
| 290 | 84558 | rc_AA799729_at | NM_017031 | 0.005367894 | | | | | 0.006983609 |
| 290 | 84559 | rc_AA799729_g_at | NM_017031 | | −0.003253038 | | | −0.011008583 | |
| 291 | 82978 | J04591_at | NM_012789 | 0.007971727 | | | | | |
| 292 | 80223 | J04731_at | NM_012970 | −0.001341426 | | | | | |
| 293 | 82069 | J04792_at | NM_012615 | 0.0023872 | | | | | |
| 294 | 78032 | J04807mRNA_i_at | NM_019130 | −0.00261233 | | | | | |
| 295 | 82769 | J04943_at | NM_012992 | −0.005066212 | −0.00627762 | | | | |
| 296 | 76874 | J05181_at | NM_012815 | −0.002111943 | | | | | |
| 297 | 76521 | J05425cds_s_at | NM_017202 | 0.010461081 | | | | | |
| 298 | 79529 | J05571_s_at | NM_134351 | 0.000970803 | | | | | 0.008348271 |
| 299 | 81901 | J05592_at | NM_022676 | 0.000839142 | | | | | |
| 299 | 81902 | J05592_g_at | NM_022676 | 0.00555484 | | | | | |
| 300 | 81324 | rc_AI013194_at | NM_020075 | 0.006064963 | | | | 0.018587509 | |
| 300 | 81643 | rc_AI177986_at | NM_020075 | | −0.056766708 | | | −0.004992924 | |
| 300 | 81949 | K01677_at | NM_020075 | | | | | | −0.001953965 |
| 301 | 80428 | K01933_at | NM_012582 | | 0.000397715 | | | | |
| 302 | 81866 | K02816_g_at | NM_001009618 | −0.002661556 | | | | | |
| 303 | 81837 | K03242_at | NM_017027 | −0.000240218 | | | | | |
| 304 | 78051 | K03468_s_at | NM_012604 | 0.00170629 | | 0.008542375 | | | |
| 305 | 79785 | L00124_at | NM_012553 | 0.002990055 | | | | | |
| 306 | 78053 | L00131cds_s_at | NM_012729 | −0.006465365 | | | | | |
| 307 | 79481 | L01507_at | NM_013008 | 0.00359275 | | | | | |
| 308 | 81912 | L01702_at | NM_012763 | 0.005971331 | | | | | |
| 309 | 78057 | L01793_at | NM_031043 | 0.008603779 | | | | | |
| 309 | 82733 | U96130_at | NM_031043 | | | | 0.021066936 | | |
| 310 | 80221 | L02315_at | L02315 | 0.008836332 | | | | | |
| 311 | 82997 | L02529_at | NM_021266 | 0.011252693 | | | | | |
| 312 | 76530 | L02926_s_at | NM_012854 | | 0.001244057 | | | | |
| 312 | 79984 | X60675_at | NM_012854 | 0.004160387 | | | | | |
| 313 | 76623 | L03294_at | NM_012598 | 0.006424179 | | | | | |
| 313 | 81788 | rc_AI237731_s_at | NM_012598 | 0.002677477 | | | | | |
| 314 | 81888 | L03382_at | NM_022707 | −0.003717055 | | | | | |
| 315 | 82146 | L05489_at | NM_012945 | | 0.05303571 | | | | |
| 316 | 79422 | L06804_at | L06804 | 0.003630961 | | | | | |
| 317 | 82020 | L07073_at | NM_133593 | 0.003719411 | 0.003569022 | 0.024922837 | | | |
| 318 | 82021 | L07074_at | NM_133305 | | | | 0.010158709 | | |
| 319 | 78074 | L07380_g_at | NM_012850 | 0.00465511 | | | | | |
| 320 | 78080 | L07402_f_at | L07402 | −0.00693583 | | | | | |
| 321 | 78082 | L07408_at | L07408 | 0.000632269 | | 0.004746168 | | | |
| 322 | 78084 | L07410_at | L07410 | 0.000248766 | | | | | |
| 323 | 78085 | L07925_at | NM_019250 | 0.003250862 | | | | | |
| 323 | 78086 | L07925_g_at | NM_019250 | 6.30E−05 | | | | | |
| 324 | 78087 | L08228exon#22_s_at | NM_017010 | | −0.004027202 | | | | |
| 324 | 80281 | U11418_s_at | NM_017010 | | | | | | −0.03565821 |
| 325 | 78093 | L08495cds_s_at | NM_021841 | 0.004305005 | | | | | |
| 326 | 78094 | L08496cds_s_at | NM_017289 | −0.002125725 | | | | | |
| 327 | 82058 | L11319_at | NM_031723 | 0.005031974 | | | | | |
| 328 | 79571 | L11694_at | NM_017033 | 0.000470079 | | | | | |
| 328 | 84381 | rc_AA894296_at | NM_017033 | 0.007742428 | | | | | 0.02919039 |
| 329 | 82641 | L12025_at | NM_017076 | 0.003421032 | | | | 0.001804291 | |
| 330 | 82726 | L12383_at | NM_024151 | 0.000799434 | | | | | |
| 331 | 78109 | L13039_s_at | NM_019905 | | 0.014035502 | | | 0.018380722 | |
| 332 | 78122 | L13407_i_at | NM_012519 | −0.000384315 | | | | | |
| 333 | 78124 | L13619_at | NM_022392 | −0.005737044 | | | | | |
| 334 | 78129 | L14003UTR#1_f_at | NM_012723 | 0.004526098 | | | | | |
| 335 | 78133 | L14462_at | NM_019220 | −0.010517811 | | | | | |
| 336 | 78136 | L14937cds#1_s_at | NM_133559 | | | | | | −0.042665795 |
| 336 | 78137 | L14937cds#2_s_at | NM_133559 | | 0.029715806 | | | | |
| 337 | 81165 | rc_AA946044_s_at | NM_030857 | 0.004024346 | | | | | |
| 337 | 81831 | L14951_at | NM_030857 | 0.00087006 | | | | | |
| 338 | 82053 | L16532_at | NM_012809 | | | | | | −0.000656276 |
| 339 | 79985 | L17138_at | NM_017265 | −0.001135088 | | | | | |
| 340 | 76217 | rc_AA893328_at | NM_172008 | 0.009539109 | | | | | |
| 340 | 76535 | L18889_at | NM_172008 | −0.001032166 | | | | | |
| 341 | 81921 | L19698_at | NM_031093 | | 0.033887292 | | | | |
| 342 | 80288 | L20468_at | NM_138511 | −0.006032297 | | | | | |
| 343 | 76875 | M32167_at | NM_031836 | 0.000924681 | | | | | |
| 343 | 78149 | L20913_s_at | NM_031836 | −0.004815023 | | | | | |
| 344 | 82209 | L22760_at | NM_019185 | 0.0057379 | | | | | |
| 344 | 84783 | rc_AA800786_at | NM_019185 | 0.004902681 | | | 0.08498884 | | |
| 345 | 81900 | L22761_at | NM_144730 | −0.002122984 | | | | | |
| 346 | 81867 | L24051_at | NM_053820 | 0.009775965 | | | | | |
| 347 | 79745 | L24389_at | L24389 | | | | −0.026223661 | | |
| 348 | 79563 | L24776_at | NM_057208 | 0.005222633 | | 0.018976002 | | | |
| 349 | 76634 | L24896_s_at | NM_017165 | −0.007555899 | | | | | |
| 350 | 79650 | L24897_s_at | L24897 | −0.006293948 | | | | | |
| 351 | 82256 | L24907_at | NM_134468 | 0.005242402 | | | | | |
| 352 | 82405 | L25785_at | L25785 | | | | | 0.012336024 | |
| 353 | 79890 | L26293_at | L26293 | −0.007339693 | | | | | |
| 354 | 79592 | L27075_at | NM_016987 | | | | | 0.014514282 | |
| 355 | 80226 | L27663_at | L27663 | −0.008002433 | | | | | |
| 356 | 82033 | L29281_at | NM_019335 | | | | 0.042019624 | | |
| 357 | 78173 | L29573_s_at | NM_031343 | 0.001193588 | | | | | |
| 358 | 81857 | L31619_g_at | NM_012832 | 0.007103125 | | | | | |
| 359 | 78177 | L31622_at | NM_019297 | −0.001749584 | −0.024669267 | | | | |
| 360 | 76093 | rc_AI070295_at | NM_024127 | 0.000885106 | | | | | |
| 360 | 76094 | rc_AI070295_g_at | NM_024127 | | −0.064273516 | | | | |
| 360 | 76542 | L32591mRNA_g_at | NM_024127 | | | −0.000430949 | | | |
| 361 | 78178 | L34074cds_at | NM_021860 | −0.0017903 | | | | | |
| 362 | 82025 | L34262_at | NM_022502 | 0.014541734 | | | | | |
| 363 | 78179 | L34542cds_at | NM_021859 | 0.001470242 | | | | | |
| 364 | 79631 | L36029_at | NM_024380 | −0.001139034 | | | | | |
| 365 | 79632 | L36030_at | NM_053831 | 0.003994899 | | | | | |
| 366 | 78181 | L36664_s_at | NM_012544 | | | | | −0.003813978 | |
| 367 | 76686 | L38437_at | NM_019223 | 0.003816558 | | | | | |
| 368 | 82063 | L39991_at | L39991 | | | | 0.00529995 | | |
| 369 | 78187 | L41684mRNA_at | NM_031819 | 0.010728986 | | | | | |
| 370 | 78193 | L47281_at | L47281 | 0.00268469 | | | | | |
| 371 | 76548 | L48209_s_at | L48209 | | | | | | 0.001270648 |
| 372 | 79441 | M10094_g_at | NM_001008830 | 0.008925061 | | | | | |
| 373 | 81871 | M11266_at | NM_013078 | 0.000743579 | | | | | |
| 374 | 76552 | M11942_s_at | NM_024351 | 0.01167287 | 0.049874433 | | | | |
| 375 | 83025 | M12156_at | NM_017248 | 0.003607981 | | | | | |
| 375 | 84619 | rc_AA799893_g_at | NM_017248 | −0.000443798 | | | | | −0.037062853 |
| 376 | 78205 | M12335expandedCDS_s_at | M12335 | | 0.029831802 | | | | |
| 377 | 80420 | M12579_at | NM_012767 | 0.000742569 | | 0.014093324 | | | |
| 378 | 81895 | M13750_at | NM_017036 | 0.003686236 | | | | | |
| 379 | 83014 | M13979_at | NM_138827 | | | | | 0.006219435 | |
| 380 | 81869 | M14656_at | NM_012881 | 0.009896762 | | | | 0.039938819 | |
| 381 | 76117 | rc_AA945573_f_at | NM_017158 | −0.002369789 | | | | | |
| 381 | 78216 | M14775_s_at | NM_017158 | | 0.002590986 | | | | |
| 382 | 82685 | M15327_at | NM_019286 | | | | −0.015095148 | | |
| 383 | 80435 | M15481_g_at | NM_178866 | 0.007674963 | | | | | |
| 384 | 78224 | M15528mRNA_at | M15528 | 0.005698674 | | | | | |
| 385 | 80267 | M15882_at | NM_031974 | −0.002076495 | | | | | |
| 386 | 78226 | M16406cds_s_at | NM_080773 | −0.001914192 | | | | | |
| 387 | 80086 | M16409_at | M16409 | 0.001451213 | | | | | |
| 388 | 79464 | M16410_at | NM_019162 | 0.001871955 | | | | | |
| 389 | 78228 | M17523mRNA_at | M17523 | −0.001862629 | | | | | |
| 390 | 76560 | M19533mRNA_i_at | NM_017101 | | | | | | 0.003408297 |
| 391 | 78244 | M19648cds_f_at | NM_001005382 | −0.002902663 | | | | | |
| 391 | 78259 | M22922cds_f_at | NM_001005382 | −0.004460334 | | | | | |
| 392 | 82995 | M19651_at | NM_012953 | | −0.04343168 | | | | |
| 393 | 78248 | M20722_s_at | M20722 | | | | | | −0.018938282 |
| 394 | 78249 | M20724_s_at | M20724 | 0.001214809 | | 0.001991975 | | −0.017566514 | |
| 395 | 78252 | M21770_at | NM_012503 | 0.001075282 | | | | | |
| 396 | 79690 | M22253_at | NM_030875 | 0.010407473 | | | | | |
| 397 | 78261 | M22993cds_s_at | NM_023103 | −0.001482466 | | | | | |
| 398 | 78262 | M23566exon_s_at | NM_012488 | 0.006115052 | | | | | |
| 399 | 79040 | X16044cds_s_at | NM_017040 | | −0.014649604 | | | | |
| 399 | 81898 | M23591mRNA#2_at | NM_017040 | | | | | | −0.016761673 |
| 400 | 78263 | M23643cds_s_at | NM_013046 | | 0.013268116 | | | | |
| 400 | 78307 | M36317_s_at | NM_013046 | 0.005947591 | | | | | 0.065269712 |
| 401 | 81881 | M23697_at | NM_013151 | 0.014271808 | | | | | |
| 402 | 82017 | M24067_at | NM_012620 | | | 0.001433834 | | | |
| 403 | 76565 | M24239cds#2_f_at | M24239 | −0.000612887 | | | | | |
| 404 | 81820 | M25073_at | NM_031012 | | | | | 0.020356238 | |
| 405 | 78276 | M25348_s_at | NM_013101 | 0.014193492 | | | | | |
| 406 | 79667 | M25804_g_at | NM_145775 | 0.00414945 | | | | | |
| 407 | 78279 | M25823_s_at | NM_138507 | | | | | 0.000820311 | |
| 408 | 76660 | M26125_at | NM_012844 | 0.000404377 | | | 0.045635855 | | |
| 409 | 76569 | M26127_s_at | NM_012541 | 0.002250061 | | | | | |
| 410 | 78324 | M61211cds_s_at | NM_012978 | −0.002445643 | | | | | |
| 410 | 79423 | M26199_s_at | NM_012978 | 0.005926155 | | | | 4.94E−05 | |
| 410 | 81781 | rc_AI236945_s_at | NM_012978 | 0.00443601 | | | | | |
| 411 | 79522 | M26534_f_at | M26534 | 0.004788314 | | | | | |
| 412 | 79457 | M26643_at | NM_013178 | 0.007145732 | | | | | |
| 413 | 82027 | M26686_at | M26686 | | | | | | 0.009182848 |
| 414 | 79451 | M27223_at | NM_019266 | | | | 0.056357808 | | 0.017503796 |
| 415 | 78285 | M27434_s_at | NM_147214 | 0.001265902 | | | | 0.007784002 | |
| 416 | 76685 | M27466_at | NM_019360 | 0.004903149 | | | 0.031115866 | | |
| 417 | 81803 | M29014_at | NM_017071 | 0.003028581 | | | | | |
| 418 | 81965 | M29293_at | NM_031117 | 0.000212838 | | | | | |
| 419 | 81947 | M29358_at | NM_017160 | | −0.001685792 | | | | |
| 420 | 81828 | M30689_at | NM_139257 | −0.001264109 | | | | | |
| 421 | 78296 | M31229mRNA_s_at | NM_133285 | −0.004863567 | | | | | |
| 422 | 81826 | M32016_at | NM_017068 | −0.00211238 | | | | | |
| 423 | 79474 | M33025_s_at | NM_031975 | | | | 4.33E−02 | | |
| 423 | 82271 | X16481_r_at | NM_031975 | 0.000530526 | | | | | |
| 424 | 81915 | M33962_g_at | NM_012637 | −0.002857687 | | | | | |
| 425 | 81969 | M35270complete_seq_i_at | NM_030656 | 0.000578948 | | | | | |
| 426 | 79525 | M35297_at | NM_153722 | −0.004910426 | | | | | |
| 427 | 78308 | M36418_s_at | NM_031608 | | 0.017242095 | | | | |
| 428 | 78312 | M36804_s_at | NM_001007597 | | −0.008279444 | | | 0.003564577 | |
| 429 | 78315 | M37568cds_at | M37568 | | | 0.028938418 | | | |
| 430 | 76583 | M38566mRNA_s_at | NM_178847 | 0.004986016 | | | | | |
| 431 | 82043 | M38759_at | NM_017016 | 0.015394833 | | | | | |
| 432 | 78319 | M55015cds_s_at | NM_012749 | −0.009732145 | | | | 0.014444572 | |
| 433 | 80414 | M57507_at | NM_012770 | | | | −0.039883117 | | |
| 434 | 82839 | M57664_g_at | NM_012529 | −0.012989424 | | | | | |
| 435 | 79560 | M57705_g_at | NM_019353 | −0.006396456 | | | | | |
| 436 | 81907 | M58758_g_at | NM_031604 | 0.003673209 | | | | | |
| 437 | 82095 | M59861_at | NM_022547 | 0.003455477 | | | | | |
| 438 | 76805 | M60322_at | NM_012498 | 0.004907209 | | | | | |
| 439 | 82045 | M60655_at | NM_016991 | 0.003723799 | | | | 0.013255805 | |
| 440 | 81141 | rc_AA944156_s_at | NM_017259 | −0.000188199 | | | | | |
| 440 | 82679 | M60921_at | NM_017259 | | −0.028876949 | | | −0.016598719 | |
| 440 | 82680 | M60921_g_at | NM_017259 | −0.007645031 | | | | | |
| 441 | 78325 | M61725_s_at | M61725 | 0.000882348 | | | | | |
| 442 | 76661 | M61875_s_at | NM_012924 | | −0.018846295 | | | | |
| 443 | 76591 | M62388_at | NM_031138 | −0.000373815 | | | | | |
| 444 | 81860 | M62891_at | NM_001010964 | 0.007559816 | | | | | |
| 445 | 81878 | M63006_at | NM_016989 | 0.003212739 | | | | | |
| 446 | 76654 | M63122_at | NM_013091 | −0.002401936 | | | | | |
| 447 | 79660 | M64299_at | NM_017155 | | | | | 0.012083657 | |
| 448 | 79622 | M64488_at | NM_012665 | −0.003928866 | | | | | |
| 449 | 79518 | M64793_at | M64793 | 0.002512867 | | | | | |
| 450 | 79798 | M64795_i_at | M64795 | −0.002619945 | | | | | |
| 451 | 79431 | M64862_at | NM_022667 | −0.012564105 | | | | | |
| 452 | 80431 | M64867_at | NM_017254 | 0.001065375 | | | | | |
| 453 | 82760 | M64986_g_at | NM_012963 | 0.013595304 | | | | | |
| 454 | 79554 | M65253_at | NM_133514 | −0.009185481 | | | | | |
| 455 | 78964 | X02322Poly_A_Site#1_s_at | NM_031577 | | | | | | −0.021754019 |
| 455 | 83008 | M73486_at | NM_031577 | −0.010238344 | | | | | |
| 456 | 81833 | M73714_at | NM_031731 | −0.00083521 | | | | | |
| 457 | 79454 | M74494_g_at | NM_012504 | 0.006625775 | | | 0.006133089 | | |
| 458 | 76598 | M74776_at | M74776 | −0.007349804 | | | | | |
| 459 | 81816 | M75148_at | M7518 | | | | | | 0.015970565 |
| 460 | 76602 | M76535cds_g_at | NM_019280 | 0.011466828 | | | | | |
| 461 | 76603 | M76704_s_at | NM_012861 | | | | 0.018622993 | | |
| 462 | 82775 | M77245_at | NM_017277 | 0.000192261 | | | | | |
| 463 | 82689 | M80550_at | NM_031007 | | −0.01693447 | | | | 0.015692905 |
| 464 | 76605 | M80784_s_at | NM_017256 | 0.003682445 | | | | | |
| 465 | 78354 | M81183Exon_UTR_g_at | M81183 | 0.001069896 | | | | | |
| 466 | 83033 | M81687_at | NM_013082 | 0.004948827 | | | | | |
| 467 | 76606 | M81766_at | NM_206849 | 0.007246221 | | | | | |
| 468 | 82099 | M84210_at | NM_053997 | −0.001443935 | | | | | |
| 469 | 80423 | M84361_at | NM_023981 | | | | | | 0.046694996 |
| 470 | 78367 | M86341_at | NM_183325 | | | | | −0.000263836 | |
| 471 | 76283 | rc_AA998683_g_at | NM_031970 | | 0.080966026 | | | 0.008440323 | |
| 471 | 76285 | rc_AI176658_s_at | NM_031970 | 0.003271431 | 0.03594857 | 0.008967663 | | 0.010410886 | |
| 471 | 76607 | M86389cds_s_at | NM_031970 | 0.007356954 | 0.036650097 | 0.016860416 | | 0.012919391 | |
| 472 | 79498 | M86514_at | M86514 | 0.0128694 | | | | | |
| 473 | 82762 | M86564_at | NM_021740 | 0.002126229 | | | | | |
| 474 | 76864 | M86758_at | NM_012883 | 0.008626611 | | | | | |
| 475 | 80222 | M87634_at | NM_012560 | −0.002211767 | | | | | |
| 476 | 78372 | M87786_at | M87786 | | | | 0.025757791 | | |
| 477 | 79425 | M88111_at | NM_053996 | −0.005093163 | | | | | |
| 478 | 78375 | M88488exon_at | M88488 | 0.002576042 | 0.027571293 | | | −0.009256581 | |
| 479 | 78376 | M89646_at | NM_031112 | | | | | | 0.04432628 |
| 480 | 78382 | M89953cds_at | NM_012852 | −0.001446736 | | 0.017715612 | | | |
| 481 | 79424 | M91234_f_at | M91234 | −0.001836591 | | | | | |
| 482 | 82415 | M91466_at | NM_017161 | | | | | | 0.024724113 |
| 483 | 78390 | M91595exon_s_at | NM_013122 | 0.005043394 | | | | | |
| 484 | 81988 | M92074_at | NM_017144 | −0.007452651 | | | | | |
| 485 | 78397 | M93257_s_at | NM_012531 | 0.002275195 | | | | | |
| 486 | 81337 | rc_AI030089_at | NM_022869 | 0.001106822 | | | | | |
| 486 | 81862 | M94287_at | NM_022869 | −0.010023387 | | | | | |
| 487 | 76849 | M94548_at | NM_019623 | 0.011447026 | | | | | |
| 488 | 78404 | M95791cds_f_at | M95791 | 0.000689205 | | | | | |
| 489 | 82552 | M96548_at | NM_052798 | 0.005370035 | | | | | |
| 490 | 78410 | M98819mRNA_s_at | NM_138876 | −0.008225413 | 0.04697558 | | | | |
| 491 | 78411 | M98826mRNA_at | M98826 | −0.000864781 | | | | | |
| 492 | 78412 | M98826mRNA_g_at | NM_031573 | 0.002273096 | | 0.007116274 | | | |
| 493 | 78414 | M99222_s_at | NM_012918 | −0.008179853 | | | | | |
| 494 | 83628 | rc_AA684919_at | AA684919 | | | | −0.027181343 | | −0.022852566 |
| 495 | 84403 | rc_AA799323_at | AA799323 | | | | | −0.008434908 | |
| 496 | 84404 | rc_AA799328_at | AA799328 | | | | | | −0.002271833 |
| 497 | 84405 | rc_AA799330_at | NM_001007634 | −0.00555613 | −0.014015419 | | | 0.008136828 | |
| 498 | 84416 | rc_AA799412_g_at | NM_001008511 | 0.003376791 | | | | | |
| 499 | 84420 | rc_AA799427_at | AA799427 | | | | | | 0.006244692 |
| 500 | 84426 | rc_AA799442_g_at | AA799442 | 0.008094791 | | | | | |
| 501 | 84440 | rc_AA799471_at | AA799471 | | | | −0.020136264 | | |
| 502 | 84445 | rc_AA799478_at | NM_022700 | 0.00380064 | | | | | |
| 503 | 76270 | rc_AA799479_g_at | AA799479 | −0.002450226 | | | | | |
| 504 | 84446 | rc_AA799480_at | AA799480 | −0.005630191 | | | | | |
| 505 | 84450 | rc_AA799488_at | AA799488 | −0.003487773 | | | | | |
| 506 | 84453 | rc_AA799495_at | AA799495 | 0.009715729 | | | 0.041752342 | | |
| 507 | 81065 | rc_AA799498_at | NM_031545 | 0.011334154 | | | | | |
| 508 | 84474 | rc_AA799534_at | AA799534 | 0.001167996 | | | | | |
| 509 | 84482 | rc_AA799544_at | AA799544 | −0.003650325 | | | | | |
| 510 | 84488 | rc_AA799554_at | AA799554 | | | | 0.003036535 | | |
| 511 | 84491 | rc_AA799566_g_at | AA799566 | 0.004284934 | | | | | |
| 512 | 84521 | rc_AA799637_at | AA799637 | −0.002952182 | | | | | |
| 513 | 84523 | rc_AA799641_at | NM_001008312 | 0.000526882 | | | | | −0.010327135 |
| 513 | 84524 | rc_AA799641_g_at | NM_001008312 | 0.01026144 | | | | | |
| 514 | 84529 | rc_AA799656_at | AA799656 | 0.000150322 | | | | | |
| 514 | 84530 | rc_AA799656_g_at | AA799656 | 0.000865355 | | | | | |
| 515 | 84556 | rc_AA799724_g_at | AA799724 | 0.005517782 | | | | | |
| 516 | 84576 | rc_AA799766_at | AA799766 | −0.010907393 | | | | | |
| 517 | 84577 | rc_AA799771_at | AA799771 | −0.009461511 | | | | | |
| 518 | 84578 | rc_AA799773_at | AA799773 | | | | | 0.005751445 | |
| 518 | 84579 | rc_AA799773_g_at | AA799773 | 0.005942549 | | 0.01634096 | | 0.004848447 | |
| 519 | 84585 | rc_AA799791_at | NM_184049 | 0.005509131 | | | | | 0.008957274 |
| 520 | 84593 | rc_AA799812_at | AA799812 | 0.003971831 | | | | | |
| 521 | 84603 | rc_AA799847_at | AA799847 | 0.014095003 | | 0.055169906 | | | |
| 522 | 84613 | rc_AA799887_s_at | NM_031331 | −0.004358308 | | | | | |
| 523 | 84630 | rc_AA799992_g_at | AA799992 | 0.000352441 | | | | | |
| 524 | 84638 | rc_AA800015_at | AA800015 | | | | −0.049503595 | | |
| 525 | 84652 | rc_AA800053_at | NM_001007618 | −0.006263749 | | | | | |
| 526 | 84663 | rc_AA800175_at | AA800175 | 0.003056539 | | | | | |
| 527 | 84685 | rc_AA800222_at | AA800222 | 0.004499702 | | | | | |
| 528 | 84696 | rc_AA800272_at | AA800272 | −0.003694561 | | | | | |
| 529 | 76706 | U53922_at | NM_022934 | | 0.005855112 | | | 0.005170846 | |
| 529 | 84719 | rc_AA800551_at | NM_022934 | | −0.053507545 | | | | |
| 530 | 84723 | rc_AA800572_at | AA800572 | −0.004247268 | | 0.041515002 | | | −0.0124693 |
| 531 | 84738 | rc_AA800651_s_at | AA800651 | | | | | 0.005697304 | |
| 532 | 84740 | rc_AA800665_at | NM_023955 | −0.000370521 | | | | | |
| 533 | 84745 | rc_AA800678_g_at | AA800678 | | −0.063346114 | | | | |
| 534 | 84747 | rc_AA800680_at | AA800680 | −0.002893909 | | | | | |
| 535 | 84749 | rc_AA800686_at | AA800686 | −0.008590838 | | | −0.063422676 | | |
| 536 | 84761 | rc_AA800719_at | AA800719 | 0.003958271 | | | | | |
| 537 | 84773 | rc_AA800750_f_at | AA800750 | 0.010765312 | | | | | |
| 538 | 84782 | rc_AA800784_at | NM_031327 | 0.001361422 | | | | | |
| 539 | 84799 | rc_AA800849_f_at | AA800849 | 0.007093074 | | | | | |
| 540 | 84804 | rc_AA800853_at | NM_001002830 | −0.001029726 | | | | 0.009232067 | |
| 541 | 84816 | rc_AA800912_g_at | NM_001001504 | 0.004810884 | | | | | |
| 542 | 81086 | rc_AA801286_at | NM_032057 | | | | | | −0.008449475 |
| 543 | 81489 | rc_AA817846_at | NM_053995 | −0.000910395 | | | | | |
| 544 | 81490 | rc_AA817887_at | NM_022511 | | | | −0.019688951 | | |
| 545 | 81511 | rc_AA818025_g_at | AA818025 | 0.002705228 | | | | | |
| 546 | 81524 | rc_AA818114_at | NM_017355 | | | | | | 0.011449245 |
| 547 | 81534 | rc_AA818144_at | NM_017096 | 0.003166608 | | | | | |
| 548 | 81600 | rc_AA818970_s_at | NM_017333 | 0.007046339 | | | | | |
| 549 | 81601 | rc_AA818982_at | NM_012887 | 0.001960938 | | | | | |
| 549 | 81602 | rc_AA818982_g_at | NM_012887 | 0.006347934 | | | | | |
| 550 | 81090 | rc_AA849036_at | NM_017090 | −0.00148607 | | | | | |
| 551 | 81092 | rc_AA849648_at | NM_053330 | 0.009772183 | | | | | |
| 552 | 81098 | rc_AA850669_at | NM_053891 | −0.000846356 | | | | | |
| 552 | 82494 | U50707_at | NM_053891 | | | | | | 0.00555806 |
| 553 | 81100 | rc_AA850756_at | NM_012857 | −0.003189568 | | | | | |
| 554 | 76272 | rc_AA851403_at | AA851403 | −0.001284935 | | | | | |
| 554 | 76273 | rc_AA851403_g_at | AA851403 | 0.003818363 | | | | | |
| 555 | 81797 | rc_AA858520_at | NM_012561 | −0.002367469 | | | | −0.009044169 | |
| 556 | 83046 | rc_AA858586_at | AA858586 | | | | | | 0.034230693 |
| 557 | 83050 | rc_AA858600_at | AA858600 | −0.00803417 | | | | | |
| 558 | 83052 | rc_AA858603_g_at | AA858603 | | | | | | −0.038308353 |
| 559 | 78660 | S82383_s_at | NM_173111 | | −0.007422005 | | | 0.008821859 | |
| 559 | 81795 | rc_AA859305_s_at | NM_173111 | | | | | 0.020387205 | |
| 560 | 76323 | rc_AA859372_s_at | AA859372 | −0.008167318 | | | 0.05285992 | | |
| 561 | 83066 | rc_AA859473_at | NM_053555 | 0.002735623 | | | | | |
| 562 | 83069 | rc_AA859483_at | AA859483 | −8.50E−05 | | | | | |
| 563 | 83082 | rc_AA859533_at | AA859533 | | | | −0.047762669 | | |
| 564 | 83094 | rc_AA859581_at | NM_138518 | | | | | | 0.061714657 |
| 565 | 83099 | rc_AA859597_at | AA859597 | | | | | | 0.005064774 |
| 566 | 77049 | rc_AA859648_at | AA859648 | | −0.019052977 | | | | |
| 567 | 83115 | rc_AA859663_at | AA859663 | 0.007430781 | | | | | |
| 568 | 83122 | rc_AA859680_at | AA859680 | 0.00931698 | | | | | |
| 569 | 83134 | rc_AA859718_at | AA859718 | | | | 1.64E−05 | | −0.007710244 |
| 570 | 83135 | rc_AA859719_at | AA859719 | 0.00016051 | | | | | |
| 571 | 83138 | rc_AA859740_at | AA859740 | | | | | | 0.001655408 |
| 572 | 83140 | rc_AA859750_at | AA859750 | | | | | | 0.021363096 |
| 573 | 83144 | rc_AA859760_at | AA859760 | −0.000952225 | | | | | |
| 574 | 83150 | rc_AA859804_at | AA859804 | 0.006016185 | | | | | |
| 575 | 83151 | rc_AA859805_at | NM_001012125 | 0.005341759 | | | | | |
| 576 | 83152 | rc_AA859806_at | NM_024161 | 0.005028894 | | | | | |
| 577 | 83154 | rc_AA859827_at | AA859827 | | 0.031544488 | | | 0.006662761 | |
| 578 | 81002 | rc_AA859830_s_at | NM_017087 | | | | | 0.031669772 | |
| 579 | 78820 | U57050_g_at | NM_031978 | 0.001912498 | | | | | |
| 579 | 83165 | rc_AA859869_s_at | NM_031978 | 0.003672405 | | | 0.001819666 | | |
| 580 | 77050 | rc_AA900380_at | NM_130426 | −0.002210573 | | | | | |
| 580 | 83172 | rc_AA859889_at | NM_130426 | | | | | | −0.002564839 |
| 581 | 83185 | rc_AA859922_at | AA859922 | 0.005289153 | | | 0.030315386 | | |
| 582 | 83199 | rc_AA859954_at | NM_138839 | −0.002480264 | | | | | |
| 583 | 83210 | rc_AA859983_at | AA859983 | −0.001803564 | | | | | |
| 584 | 83214 | rc_AA859994_at | AA859994 | | | | | | 0.060637375 |
| 585 | 83215 | rc_AA859996_at | AA859996 | | | | −0.020661856 | | |
| 586 | 83222 | rc_AA860024_at | AA860024 | −0.01071322 | | | | | |
| 587 | 81155 | rc_AA945321_at | NM_134326 | | −0.006286767 | | | | |
| 587 | 83234 | rc_AA860062_g_at | NM_134326 | | 0.041784117 | | | 0.02116456 | |
| 587 | 83240 | rc_AA866237_s_at | NM_134326 | 0.01035651 | | 0.030025172 | | | |
| 588 | 83235 | rc_AA866221_at | AA866221 | | | | | | 0.021857116 |
| 589 | 83250 | rc_AA866272_at | AA866272 | 0.001100005 | | | | | −0.04309076 |
| 590 | 83265 | rc_AA866362_at | AA866362 | −0.008781529 | | | | | |
| 591 | 83274 | rc_AA866414_at | NM_012651 | 0.017450818 | | | | | |
| 592 | 83277 | rc_AA866426_at | AA866426 | | | | | | −0.002404722 |
| 593 | 83281 | rc_AA866439_g_at | AA866439 | 0.010987448 | | | | | |
| 594 | 83283 | rc_AA866444_s_at | AA866444 | | | | 0.100440702 | | −0.015328696 |
| 595 | 83302 | rc_AA874803_g_at | AA874803 | | | | | 0.010381065 | |
| 596 | 83305 | rc_AA874815_at | AA874815 | | | | | | 0.007037474 |
| 597 | 83308 | rc_AA874832_at | AA874832 | 0.006270037 | | | | | |
| 598 | 83322 | rc_AA874874_at | NM_017270 | 0.0057985 | | | | | |
| 599 | 83346 | rc_AA874952_at | AA874952 | | | | 0.008067541 | | |
| 600 | 83354 | rc_AA874995_at | NM_001007703 | 0.002595813 | | 0.049089357 | | | |
| 601 | 83355 | rc_AA874999_at | AA874999 | 0.005158087 | | | | | |
| 602 | 83357 | rc_AA875002_at | AA875002 | 0.007862894 | | | | | |
| 603 | 83359 | rc_AA875010_at | NM_053589 | 0.001225273 | | | | | |
| 604 | 83360 | rc_AA875017_at | AA875017 | | | | | | 0.003767403 |
| 605 | 83374 | rc_AA875042_at | AA875042 | | | | | | −0.003395042 |
| 606 | 83385 | rc_AA875089_at | NM_053295 | 0.007609667 | | 0.061475675 | | | |
| 607 | 83388 | rc_AA875098_at | AA875098 | 0.00073985 | | | | | |
| 608 | 83392 | rc_AA875121_at | NM_012866 | | | 0.023945817 | | | |
| 609 | 83397 | rc_AA875126_g_at | AA875126 | | | 0.023132493 | | | |
| 610 | 83413 | rc_AA875165_at | AA875165 | | | | −0.069786007 | | |
| 611 | 83415 | rc_AA875171_at | AA875171 | 0.003580111 | | | | | |
| 611 | 83416 | rc_AA875171_g_at | AA875171 | 0.002270274 | | 0.03038693 | | | |
| 612 | 83418 | rc_AA875182_at | AA875182 | | | | 0.006078842 | | |
| 613 | 83423 | rc_AA875197_at | AA875197 | | | | | | 0.030036996 |
| 614 | 83424 | rc_AA875198_at | NM_001008386 | | | | | | −0.005616964 |
| 615 | 83428 | rc_AA875205_g_at | AA875205 | −0.000528627 | | | | | |
| 616 | 83429 | rc_AA875206_at | NM_053747 | −0.003130729 | | | | | |
| 617 | 83443 | rc_AA875255_at | AA875255 | | | | | | −0.002837261 |
| 618 | 83446 | rc_AA875263_at | AA875263 | 0.008967186 | | | | | |
| 619 | 83450 | rc_AA875275_at | AA875275 | | | | | | 0.03898176 |
| 620 | 76248 | rc_AA875327_at | NM_001006957 | −0.004153801 | | | | | |
| 621 | 83459 | rc_AA875348_at | AA875348 | | | | | | 0.029240504 |
| 622 | 83463 | rc_AA875405_at | NM_001012091 | 0.012075055 | | | | | |
| 623 | 83472 | rc_AA875428_at | AA875428 | | 0.009396528 | | | | |
| 624 | 83476 | rc_AA875444_at | AA875444 | | | | | | −0.003541399 |
| 625 | 83480 | rc_AA875468_at | AA875468 | | | | | | 0.003171944 |
| 626 | 81401 | rc_AI070967_g_at | NM_012903 | 0.002751123 | | | | | |
| 626 | 83483 | rc_AA875495_at | NM_012903 | 0.003680805 | | | | | |
| 626 | 84218 | rc_AA893496_at | NM_012903 | | | | 0.018984788 | | |
| 627 | 83486 | rc_AA875506_at | NM_053824 | | | | | | 0.002840699 |
| 628 | 83505 | rc_AA875598_at | AA875598 | 0.000830058 | | | | | |
| 629 | 83509 | rc_AA875617_at | NM_031083 | | | | | | −0.008089917 |
| 630 | 83516 | rc_AA875641_at | AA875641 | | | | | | 0.001881294 |
| 631 | 83522 | rc_AA875665_g_at | NM_001008694 | 0.003456358 | | | | | |
| 632 | 83635 | rc_AA891032_at | AA891032 | −0.002539816 | | | | | |
| 633 | 83642 | rc_AA891058_at | AA891058 | | | | | | −0.022152715 |
| 634 | 83644 | rc_AA891069_at | AA891069 | −0.00538359 | | | | | |
| 635 | 83649 | rc_AA891140_at | AA891140 | | | | | | −0.018521384 |
| 635 | 83650 | rc_AA891140_g_at | AA891140 | 0.002586929 | | | | | |
| 636 | 83655 | rc_AA891196_at | AA891196 | | | | 0.100944415 | | |
| 637 | 83660 | rc_AA891220_at | NM_177928 | 0.001611575 | | | −0.009705684 | | |
| 638 | 83661 | rc_AA891221_at | AA891221 | 0.007721937 | | | | | |
| 639 | 78837 | U63923_at | NM_031614 | 0.000688251 | | | | | |
| 639 | 83671 | rc_AA891286_at | NM_031614 | −0.010211869 | | | | | |
| 640 | 83681 | rc_AA891314_at | AA891314 | 0.007136435 | | | | | |
| 641 | 83684 | rc_AA891356_at | AA891356 | 0.006773782 | | | | | |
| 642 | 83685 | rc_AA891362_at | NM_057186 | | | | | | 0.013554353 |
| 643 | 83555 | rc_H31665_at | NM_080902 | | | | | | −0.028862975 |
| 643 | 83688 | rc_AA891422_at | NM_080902 | −0.007932954 | | | | | |
| 644 | 83689 | rc_AA891423_at | AA891423 | | | | −0.059021696 | | |
| 645 | 83698 | rc_AA891476_at | AA891476 | 0.009388522 | | | | | |
| 646 | 83702 | rc_AA891524_at | NM_001008367 | | | | | 0.011566687 | |
| 647 | 83705 | rc_AA891542_at | AA891542 | 0.001444456 | 0.03878479 | | | 0.003342183 | |
| 648 | 83708 | rc_AA891553_at | NM_001004283 | −0.006514491 | | | | | |
| 649 | 83716 | rc_AA891588_at | AA891588 | −0.003510287 | | | | | |
| 650 | 83718 | rc_AA891591_at | NM_031356 | | | | | | −0.016209811 |
| 651 | 83720 | rc_AA891596_at | AA891596 | 0.000863069 | | | | | |
| 652 | 83722 | rc_AA891614_at | NM_139332 | 0.002372024 | | | | | |
| 653 | 83723 | rc_AA891631_at | AA891631 | 0.010199871 | | | | | |
| 654 | 83729 | rc_AA891666_g_at | NM_001007804 | | | | | | −0.000187834 |
| 655 | 83743 | rc_AA891713_at | NM_173340 | | | | | −0.007428801 | |
| 656 | 83747 | rc_AA891719_at | AA891719 | −0.00443289 | | | | | |
| 657 | 83748 | rc_AA891721_at | NM_001009647 | 0.006110493 | | | | | −0.012200106 |
| 658 | 83749 | rc_AA891724_at | NM_198765 | −0.002022493 | | | −0.008623252 | | |
| 659 | 83752 | rc_AA891727_g_at | AA891727 | | | | | | −0.043856629 |
| 660 | 83757 | rc_AA891737_at | AA891737 | −0.004544375 | | | −0.047028324 | | |
| 661 | 83761 | rc_AA891746_at | AA891746 | 0.005867454 | | | | | |
| 662 | 81025 | rc_AA891764_s_at | NM_030827 | −0.001832133 | | | | | |
| 663 | 83781 | rc_AA891810_at | AA891810 | 0.003866891 | | | | | |
| 663 | 83782 | rc_AA891810_g_at | AA891810 | 0.008360481 | | | | | |
| 664 | 83797 | rc_AA891838_at | AA891838 | | −0.023837508 | | | | |
| 665 | 83800 | rc_AA891842_g_at | AA891842 | | 0.031931754 | | | | |
| 666 | 83803 | rc_AA891851_at | AA891851 | −0.001124354 | | | | | |
| 667 | 83813 | rc_AA891877_at | AA891877 | 0.008255255 | | | | | |
| 668 | 83815 | rc_AA891880_g_at | NM_022948 | −0.001837238 | | | | | 0.017260857 |
| 669 | 83822 | rc_AA891903_at | AA891903 | −0.001324754 | | | | | |
| 670 | 83824 | rc_AA891914_at | NM_001005383 | | | | −0.059143418 | | |
| 671 | 83825 | rc_AA891916_at | NM_032615 | −0.00626898 | | | | | |
| 671 | 83826 | rc_AA891916_g_at | NM_032615 | 0.011123591 | | | | | |
| 672 | 83827 | rc_AA891917_at | AA891917 | 0.002901743 | | | | | |
| 673 | 83838 | rc_AA891940_at | AA891940 | | −0.047915831 | | | | |
| 674 | 83839 | rc_AA891943_at | AA891943 | −0.001238999 | | | | | |
| 675 | 83846 | rc_AA891969_at | AA891969 | | −0.035329818 | | | | |
| 676 | 83851 | rc_AA892006_g_at | AA892006 | 0.002379297 | | | | | |
| 677 | 83855 | rc_AA892012_g_at | NM_013177 | −0.000992537 | | | 0.028538151 | | |
| 678 | 83857 | rc_AA892014_r_at | NM_139101 | | | | 0.030134899 | | |
| 679 | 83861 | rc_AA892042_at | AA892042 | | | | | | 0.020338447 |
| 680 | 83862 | rc_AA892049_at | AA892049 | | | | 0.040333594 | | |
| 681 | 83871 | rc_AA892112_g_at | AA892112 | | | | | −0.009478954 | |
| 682 | 83886 | rc_AA892204_at | AA892204 | | | | −0.000132542 | | |
| 683 | 83888 | rc_AA892228_at | AA892228 | | −0.023967283 | | | | |
| 684 | 76221 | rc_AA892248_at | AA892248 | | | | | | −0.01169609 |
| 684 | 76222 | rc_AA892248_g_at | AA892248 | 0.005168346 | | | | | −0.001978019 |
| 685 | 83895 | rc_AA892258_at | NM_053524 | | | | 0.012000131 | | |
| 686 | 83912 | rc_AA892298_at | NM_175707 | −0.004909686 | | | | | |
| 687 | 83917 | rc_AA892303_g_at | NM_001009666 | | −0.003309766 | | | 0.029387265 | |
| 688 | 83919 | rc_AA892305_at | NM_001007707 | −0.006348242 | | | | | |
| 689 | 83922 | rc_AA892310_at | AA892310 | 0.000779846 | | | | | |
| 690 | 83928 | rc_AA892318_g_at | AA892318 | 0.007176704 | | | | | |
| 691 | 83947 | rc_AA892378_g_at | AA892378 | 0.002486153 | | | | | |
| 692 | 83948 | rc_AA892380_at | AA892380 | −0.001520705 | | | −0.067903079 | | |
| 693 | 83958 | rc_AA892400_at | NM_198736 | −0.001099869 | | | | | |
| 694 | 83965 | rc_AA892462_at | AA892462 | | | | 0.003798135 | | 0.019270565 |
| 695 | 83969 | rc_AA892470_at | AA892470 | | −0.014962594 | | | | |
| 696 | 83977 | rc_AA892498_at | NM_001005547 | −0.010718758 | | | | | |
| 697 | 83985 | rc_AA892520_at | AA892520 | −0.003283709 | | | | | |
| 697 | 83986 | rc_AA892520_g_at | AA892520 | 0.000213305 | | | | | |
| 698 | 83988 | rc_AA892526_at | AA892526 | 0.01533824 | | | | | |
| 699 | 76243 | rc_AA892532_at | NM_001004442 | | −0.052536596 | | | | |
| 700 | 83999 | rc_AA892551_i_at | AA892551 | −0.005179648 | | | | | |
| 701 | 84004 | rc_AA892557_at | NM_001007802 | | | | | 0.006785172 | |
| 702 | 84014 | rc_AA892578_at | AA892578 | 0.007516131 | 0.056262537 | | | | |
| 703 | 84015 | rc_AA892582_s_at | AA892582 | | 0.029592314 | | | | |
| 704 | 84016 | rc_AA892593_at | AA892593 | | | | | | −0.000309005 |
| 705 | 84017 | rc_AA892598_at | NM_175580 | −0.000688959 | | | | | |
| 705 | 84018 | rc_AA892598_g_at | NM_175580 | | −0.006337728 | | | 0.001587735 | |
| 706 | 84022 | rc_AA892630_at | AA892630 | −0.00012429 | | | | | |
| 707 | 84025 | rc_AA892635_g_at | AA892635 | 0.001931834 | | | | | |
| 708 | 84031 | rc_AA892647_at | AA892647 | 0.002876995 | | | | | |
| 709 | 81037 | rc_AA892775_at | NM_012771 | | −0.035311125 | | | | |
| 710 | 84052 | rc_AA892779_at | AA892779 | 0.00783691 | | | | | |
| 711 | 84069 | rc_AA892820_at | AA892820 | | | −0.013211487 | | −0.004118393 | |
| 712 | 84072 | rc_AA892828_at | NM_001007620 | 0.011228277 | | | | | |
| 713 | 84076 | rc_AA892832_at | NM_134382 | 0.003898561 | | 0.049805322 | | | |
| 714 | 84079 | rc_AA892843_at | NM_001007637 | −0.001478317 | | | | | |
| 715 | 84083 | rc_AA892851_g_at | NM_001008521 | −0.00263455 | | | | | |
| 716 | 84085 | rc_AA892855_at | NM_001009690 | | | | | | 0.020121134 |
| 717 | 84089 | rc_AA892860_g_at | AA892860 | 0.002618366 | | | | | |
| 718 | 84090 | rc_AA892861_at | AA892861 | | | | −0.008973022 | | |
| 719 | 84106 | rc_AA892940_g_at | AA892940 | 0.001289925 | | | | | |
| 720 | 84115 | rc_AA892987_at | AA892987 | −0.007682307 | | | | | |
| 721 | 84118 | rc_AA892997_at | AA892997 | −0.006734893 | | | | | |
| 722 | 84128 | rc_AA893035_s_at | NM_134330 | | | | | | −0.0072966 |
| 723 | 84132 | rc_AA893043_at | AA893043 | | | | −0.050210056 | | |
| 724 | 84153 | rc_AA893172_at | AA893172 | | | | 0.09671519 | | |
| 725 | 84158 | rc_AA893184_at | AA893184 | 0.004214224 | | | | | |
| 726 | 84181 | rc_AA893237_at | AA893237 | 0.000479633 | | | | | |
| 727 | 84182 | rc_AA893239_at | NM_053493 | | | | | −0.009150149 | |
| 728 | 84183 | rc_AA893242_at | NM_012820 | | | | 0.012680237 | | |
| 728 | 84184 | rc_AA893242_g_at | NM_012820 | −0.0036044 | | | | | |
| 729 | 84185 | rc_AA893244_at | AA893244 | 0.008792292 | | | | | |
| 730 | 84186 | rc_AA893246_at | NM_199386 | | | | −0.031042485 | | |
| 731 | 84192 | rc_AA893280_at | NM_001007144 | | 0.027992204 | | | −0.006965129 | |
| 732 | 84216 | rc_AA893493_i_at | AA893493 | | | | | | 0.028944591 |
| 733 | 84224 | rc_AA893534_at | AA893534 | | | 0.056477818 | | | |
| 734 | 84230 | rc_AA893584_at | AA893584 | 0.009607751 | | | | | |
| 735 | 84232 | rc_AA893592_at | AA893592 | 0.003299129 | | | | | |
| 736 | 84250 | rc_AA893659_at | AA893659 | | | | | | 0.028308157 |
| 737 | 84279 | rc_AA893770_g_at | NM_139104 | 0.00429907 | | | | | |
| 738 | 84281 | rc_AA893781_at | AA893781 | 0.006968054 | | | | | 0.019372323 |
| 739 | 84287 | rc_AA893821_at | NM_134398 | | | | | | −0.011738643 |
| 740 | 84291 | rc_AA893857_at | AA893857 | | | | 0.01900966 | | |
| 741 | 84313 | rc_AA893984_at | AA893984 | | | | 0.070007923 | | |
| 742 | 84316 | rc_AA894004_at | AA894004 | | | | | 0.018239648 | |
| 743 | 84317 | rc_AA894008_at | AA894008 | −0.001489864 | | | | | |
| 744 | 84320 | rc_AA894016_at | AA894016 | | | | −0.022995815 | | |
| 745 | 84322 | rc_AA894027_at | AA894027 | | | | −0.081102578 | | |
| 746 | 84326 | rc_AA894045_at | NM_181822 | | −0.005842006 | | | | |
| 747 | 84338 | rc_AA894092_at | AA894092 | | 0.046224771 | | | | |
| 748 | 81056 | rc_AA894174_at | NM_001009668 | −0.004303737 | | | | | |
| 749 | 84360 | rc_AA894200_g_at | AA894200 | 0.003290009 | | | | | |
| 750 | 84374 | rc_AA894259_at | AA894259 | 0.003438482 | | | | | |
| 751 | 84380 | rc_AA894292_at | AA894292 | 0.005215236 | | | | | |
| 752 | 84383 | rc_AA894304_at | AA894304 | −0.005040496 | | | | | |
| 753 | 81059 | rc_AA894317_s_at | NM_032083 | 0.012697681 | | | | | |
| 754 | 84387 | rc_AA894318_at | AA894318 | 0.001315192 | | | | | |
| 755 | 84393 | rc_AA894345_at | AA894345 | 0.006273233 | | | | | |
| 756 | 81110 | rc_AA899106_at | NM_022267 | 0.004268189 | | | | | |
| 757 | 81116 | rc_AA900503_at | NM_019147 | | | | 0.042029105 | | −0.013994777 |
| 758 | 81126 | rc_AA900900_s_at | NM_032067 | | | | 0.091797057 | | |
| 759 | 77051 | rc_AA925300_at | AA925300 | | | | | −0.006025421 | |
| 760 | 81191 | rc_AA925752_at | NM_031561 | 0.010204397 | | | | | |
| 761 | 77054 | rc_AA926129_at | AA926129 | −0.006140817 | | | | | |
| 762 | 76254 | rc_AA926149_g_at | NM_012520 | 0.010403853 | | | | | |
| 763 | 81152 | rc_AA945169_at | NM_012681 | 0.005191478 | | | | | |
| 764 | 81154 | rc_AA945171_at | AA945171 | −0.000289178 | | | | | |
| 765 | 76346 | rc_AA945704_at | AA945704 | | −0.05522422 | | | | |
| 766 | 81162 | rc_AA945737_at | NM_022205 | 0.001072872 | | | | | |
| 767 | 76312 | rc_AA946040_at | AA946040 | | | | | | 0.014251159 |
| 768 | 81166 | rc_AA946108_at | AA946108 | 0.009364262 | | | | | |
| 769 | 81167 | rc_AA946251_at | NM_030829 | 0.000246211 | | | | | |
| 770 | 81172 | rc_AA946439_at | AA946439 | | | | 0.05623229 | | |
| 771 | 81226 | rc_AA957930_s_at | NM_017212 | | | | | | −0.019280678 |
| 772 | 81227 | rc_AA957961_at | NM_054006 | 0.000104188 | | | | | −0.021364913 |
| 772 | 81395 | rc_AI070521_s_at | NM_054006 | | | | 0.030489236 | | |
| 772 | 82424 | X52311_at | NM_054006 | | 0.014426865 | | | | |
| 773 | 76318 | rc_AA963449_s_at | NM_012941 | | | | −0.12358211 | | |
| 773 | 76319 | rc_AA997614_s_at | NM_012941 | −0.00294488 | | | | | |
| 773 | 76902 | U17697_s_at | NM_012941 | −0.001227975 | | | | 0.005734316 | |
| 774 | 81235 | rc_AA964530_at | NM_024150 | 0.003010634 | | | | | |
| 775 | 81238 | rc_AA965119_at | NM_031534 | 0.011144083 | | | | | |
| 776 | 76343 | rc_AI007820_s_at | NM_001004082 | −0.005946223 | | | | | |
| 776 | 76344 | rc_AI008074_s_at | NM_001004082 | 0.002051131 | | 0.030953844 | | | |
| 777 | 81262 | rc_AI007824_g_at | AI007824 | | | | | | −0.013277269 |
| 778 | 81263 | rc_AI007835_at | NM_053343 | 0.001639722 | | | | | |
| 779 | 76186 | rc_AI009141_at | AI009141 | | | | | | −0.015490749 |
| 780 | 76276 | rc_AI009390_at | AI009390 | −0.010502044 | | | | | |
| 781 | 81286 | rc_AI009605_at | NM_013216 | 0.002906278 | | | | | 0.00890716 |
| 782 | 81292 | rc_AI010083_at | NM_057114 | | | | 0.022898815 | | |
| 783 | 81295 | rc_AI010453_at | NM_022519 | | | | | 0.00458851 | |
| 784 | 76191 | rc_AI011706_at | AI011706 | | | | | | 0.024339502 |
| 785 | 81309 | rc_AI012595_at | NM_017039 | | | | −0.086817828 | | |
| 786 | 81325 | rc_AI013389_at | NM_012521 | 0.008698172 | | | | | |
| 787 | 81326 | rc_AI013472_at | NM_138905 | | | | | 0.013890327 | |
| 788 | 81329 | rc_AI013795_at | NM_022713 | 0.00805401 | | | | | |
| 789 | 76170 | rc_AI013834_s_at | NM_024392 | −0.017962317 | | | | | |
| 790 | 81318 | rc_AI014135_at | AI014135 | | 0.032116415 | | | | |
| 791 | 81320 | rc_AI014163_at | NM_019242 | | −0.020785919 | | | −0.008578385 | |
| 792 | 81333 | rc_AI029183_s_at | NM_012567 | 0.003737449 | | | | | |
| 793 | 81334 | rc_AI029279_at | NM_053868 | 0.001160078 | | | | | |
| 794 | 81342 | rc_AI031019_at | NM_172029 | −0.001381499 | | | | | |
| 795 | 81359 | rc_AI044517_at | NM_017215 | 0.000787246 | | | | | |
| 795 | 82215 | U15098_at | NM_017215 | 0.001213597 | | | | | |
| 796 | 81361 | rc_AI044716_at | NM_153735 | −0.007078477 | | | | | |
| 797 | 81362 | rc_AI044739_at | NM_133423 | 0.007738837 | | | | | |
| 798 | 81366 | rc_AI044985_g_at | NM_019241 | 0.006849151 | | | | | |
| 799 | 81392 | rc_AI070142_at | NM_017030 | 0.004317143 | | | | | |
| 800 | 81396 | rc_AI070577_at | NM_012817 | 0.005615894 | | 0.032602293 | | | |
| 801 | 81398 | rc_AI070783_at | NM_017313 | 0.003905441 | | | | | |
| 802 | 81403 | rc_AI071104_at | NM_012774 | 0.005502534 | | | | | |
| 803 | 81405 | rc_AI071299_at | NM_031135 | | | | 0.046623766 | | |
| 804 | 81412 | rc_AI071866_s_at | AI071866 | 0.009475712 | | 0.046925673 | | | −0.009066898 |
| 805 | 81426 | rc_AI073232 s_at | NM_019246 | 0.001003873 | | | | | |
| 806 | 81471 | rc_AI101320_at | AI101320 | | | | 0.047475109 | | |
| 807 | 81494 | rc_AI102044_at | AI102044 | 0.000251044 | | | | 0.02357011 | 0.005666544 |
| 808 | 81498 | rc_AI102205_s_at | NM_024000 | | | | | | −0.018765764 |
| 809 | 81513 | rc_AI103671_at | NM_053311 | | | | | | 0.00371935 |
| 810 | 81517 | rc_AI103911_at | NM_001008888 | 0.002842338 | | | | | |
| 811 | 81518 | rc_AI103957_at | NM_013087 | −0.004321481 | | | | | |
| 812 | 76313 | rc_AI104035_s_at | AI104035 | −0.003752014 | | | | | |
| 813 | 76204 | rc_AI104077_at | AI104077 | 0.001700796 | | | | | |
| 814 | 81527 | rc_AI104399_at | NM_022922 | | −0.035280823 | | | | |
| 815 | 81529 | rc_AI104513_at | NM_145783 | 0.002605906 | | | | | |
| 816 | 81536 | rc_AI104781_at | NM_017260 | −0.005911732 | | | | | |
| 817 | 81539 | rc_AI105348_i_at | NM_017147 | | | | | | −0.010353994 |
| 818 | 81429 | rc_AI112173_at | NM_013113 | 0.000267698 | | | | | |
| 819 | 81436 | rc_AI136396_at | NM_172034 | 0.00526251 | | | | | |
| 820 | 76228 | rc_AI136977_at | AI136977 | 0.006379977 | | | | | |
| 821 | 81447 | rc_AI137583_at | NM_013060 | 0.004202351 | | | | | |
| 822 | 81451 | rc_AI138143_at | NM_012796 | 0.015097915 | | | | | |
| 823 | 81459 | rc_AI145367_at | NM_053874 | 0.004850133 | | | | | |
| 824 | 81465 | rc_AI145680_s_at | NM_012716 | 0.004836307 | | | | | |
| 825 | 76347 | rc_AI169265_at | AI169265 | 0.002504574 | | | | | |
| 826 | 81483 | rc_AI169327_at | NM_053819 | 0.001143893 | 0.082290651 | | | | |
| 826 | 81484 | rc_AI169327_g_at | NM_053819 | 0.002720675 | 0.065911479 | | | | |
| 827 | 81544 | rc_AI169612_at | NM_053365 | | | | | | 0.022227731 |
| 828 | 81548 | rc_AI169756_s_at | AI169756 | | −0.003421449 | | | | |
| 829 | 76133 | rc_AI170379_at | AI170379 | 0.004379275 | 0.066801371 | | | −0.000900617 | |
| 830 | 81557 | rc_AI170411_s_at | NM_053591 | 0.00627782 | | | | | 0.016760481 |
| 831 | 81559 | rc_AI170608_at | NM_031616 | | | | | | 0.040525773 |
| 832 | 76288 | rc_AI170685_at | NM_032079 | −0.002727749 | | | | | |
| 832 | 76289 | rc_AI170685_g_at | NM_032079 | | | | −0.049022863 | | |
| 833 | 79331 | Z18878cds_at | NM_053994 | 0.000707401 | | | | | |
| 833 | 81563 | rc_AI170911_at | NM_053994 | 0.010606506 | | | | | |
| 834 | 81565 | rc_AI171067_at | NM_012600 | 0.007144394 | | | | | |
| 835 | 81577 | rc_AI171844_at | NM_139099 | | | | | | 0.006661896 |
| 836 | 81584 | rc_AI172064_at | NM_019904 | | | | | | 0.025308372 |
| 837 | 76357 | rc_AI172452_at | AI172452 | −0.00386007 | | −0.003677218 | | | 0.000913233 |
| 838 | 81595 | rc_AI175486_at | AI175486 | 0.002137807 | | | | | 0.00509212 |
| 839 | 81606 | rc_AI175935_at | NM_173101 | 0.002963474 | | | | | |
| 840 | 81611 | rc_AI176351_s_at | NM_031137 | | | | −0.012286134 | | |
| 840 | 81644 | rc_AI178007_at | NM_031137 | | | | 0.080288041 | | |
| 841 | 81613 | rc_AI176460_s_at | AI176460 | 0.001372121 | | | | | |
| 842 | 81614 | rc_AI176461_s_at | NM_017211 | −0.000662681 | | | | 0.010532147 | |
| 842 | 82500 | U08136_at | NM_017211 | | −0.004474987 | | | | |
| 843 | 81620 | rc_AI176595_s_at | NM_013156 | 0.005616753 | | | −0.041266536 | | |
| 844 | 81624 | rc_AI176710_at | NM_031628 | | 0.006435494 | −0.006665472 | | | |
| 845 | 76293 | rc_AI176726_at | AI176726 | 0.003732553 | | | | | |
| 846 | 81629 | rc_AI177052_at | AI177052 | 0.000926078 | | | | | |
| 847 | 81632 | rc_AI177161_at | NM_031789 | 0.005655247 | | | 0.028011179 | | |
| 847 | 81633 | rc_AI177161_g_at | NM_031789 | 0.001587968 | | | 0.05377377 | | |
| 848 | 81637 | rc_AI177503_at | NM_053985 | −0.000648001 | | | | 0.023714496 | |
| 849 | 81654 | rc_AI179012_s_at | NM_031144 | | | | | | −0.01031327 |
| 850 | 81660 | rc_AI179610_at | NM_012580 | 0.013127491 | | | | | |
| 851 | 81663 | rc_AI180013_at | NM_033351 | 7.34E−05 | | | | | |
| 852 | 81668 | rc_AI180410_i_at | NM_020079 | −0.000353802 | | | | | |
| 853 | 81671 | rc_AI180424_at | NM_013011 | | | | | | −0.02397297 |
| 854 | 81672 | rc_AI180442_at | NM_031840 | 0.000186921 | | | | | |
| 855 | 81678 | rc_AI228247_at | NM_013106 | | | | | | 0.008006737 |
| 856 | 81696 | rc_AI230211_s_at | NM_031739 | 0.013679582 | | | | | |
| 857 | 81700 | rc_AI230354_at | NM_022538 | 0.00503907 | | | | | |
| 858 | 81705 | rc_AI230712_at | NM_012999 | 0.002504384 | | | | | |
| 859 | 81706 | rc_AI230748_at | NM_053867 | | | | | | 0.001683624 |
| 860 | 81722 | rc_AI231445_at | AI231445 | −0.004891239 | | | | | −0.03965627 |
| 861 | 81726 | rc_AI231807_at | NM_022500 | | | | 0.074168501 | | |
| 862 | 81729 | rc_AI232078_at | NM_021587 | 0.009757599 | | | | | |
| 863 | 81731 | rc_AI232096_at | NM_031672 | 0.001437376 | | | | | |
| 864 | 81732 | rc_AI232194_at | NM_032084 | −0.010896328 | | | | | |
| 865 | 81733 | rc_AI232256_at | NM_030586 | −0.002797414 | | | | | |
| 866 | 81734 | rc_AI232268_at | AI232268 | 0.009207342 | | 0.017884374 | | | |
| 867 | 81755 | rc_AI234351_at | AI234351 | 0.006400552 | | | | | |
| 868 | 81759 | rc_AI234915_at | AI234915 | −0.000397042 | | | | | |
| 869 | 81778 | rc_AI236484_at | NM_198132 | 0.002831548 | | | | | |
| 870 | 76224 | rc_AI236601_at | NM_001011901 | −0.000742497 | 0.008878339 | | | −0.001643118 | |
| 871 | 81784 | rc_AI237535_s_at | AI237535 | | 0.006122441 | | | | |
| 872 | 81786 | rc_AI237592_at | AI237592 | | | | 0.030795454 | | |
| 873 | 81789 | rc_AI237825_at | NM_012533 | | | | | | 0.023602921 |
| 874 | 80438 | rc_AI638939_at | AI638939 | | 0.020116022 | | | | |
| 875 | 80439 | rc_AI638940_at | AI638940 | | | | | | −0.048857677 |
| 876 | 80450 | rc_AI638951_at | AI638951 | 0.003051321 | | | | | |
| 877 | 80451 | rc_AI638952_at | AI638952 | 0.005887171 | | | | | |
| 878 | 80465 | rc_AI638969_at | NM_133605 | −0.006517828 | | −0.021015805 | | | |
| 879 | 80489 | rc_AI638996_at | AI638996 | | | | | | 0.004854767 |
| 880 | 80497 | rc_AI639007_at | AI639007 | | | | | | 0.047538864 |
| 881 | 80523 | rc_AI639035_at | AI639035 | 0.00601714 | | | | | |
| 882 | 80545 | rc_AI639058_s_at | AI639058 | 0.002771825 | | | | 0.014402715 | |
| 883 | 80546 | rc_AI639060_at | AI639060 | 0.001611435 | | | | 0.023445156 | 0.010820573 |
| 884 | 80551 | rc_AI639065_at | AI639065 | −0.001875807 | | | | | |
| 885 | 80556 | rc_AI639071_at | AI639071 | 0.006338227 | | | | | |
| 886 | 80589 | rc_AI639107_at | AI639107 | 0.003370958 | | | | | |
| 887 | 80596 | rc_AI639115_at | NM_198743 | −0.012363288 | | −0.015403562 | | | |
| 888 | 80610 | rc_AI639132_s_at | AI639132 | | | | | 0.010690543 | |
| 889 | 80629 | rc_AI639152_at | AI639152 | 0.001944355 | | | | | |
| 890 | 80651 | rc_AI639175_at | AI639175 | 0.004664467 | | | | | |
| 891 | 80655 | rc_AI639179_at | AI639179 | 0.005282396 | | | | | |
| 892 | 80656 | rc_AI639181_at | AI639181 | 0.002275071 | | | | | |
| 893 | 80664 | rc_AI639189_at | AI639189 | | | | | 0.011695832 | |
| 894 | 80665 | rc_AI639190_at | AI639190 | 0.008799213 | | | | | |
| 895 | 80667 | rc_AI639192_at | AI639192 | | 0.040979431 | | | | |
| 896 | 80684 | rc_AI639209_at | AI639209 | −0.003084262 | | | | | |
| 897 | 80685 | rc_AI639210_at | AI639210 | 0.000994128 | | | | | |
| 898 | 80686 | rc_AI639212_at | NM_017298 | −0.005518264 | | | | | |
| 899 | 80691 | rc_AI639217_at | AI639217 | −0.003102176 | | | | | |
| 900 | 80692 | rc_AI639218_at | NM_001009268 | −0.00244123 | | | | | |
| 901 | 80715 | rc_AI639246_at | AI639246 | 0.001874346 | | | | | |
| 902 | 80723 | rc_AI639252_at | AI639252 | 0.00641721 | | 0.012032542 | | | |
| 903 | 80728 | rc_AI639256_at | NM_181376 | −0.000455993 | | | | | |
| 904 | 80733 | rc_AI639263_at | AI639263 | 0.003146426 | | | | | |
| 905 | 80734 | rc_AI639264_at | AI639264 | 0.003823948 | | | | | |
| 906 | 80755 | rc_AI639293_at | AI639293 | 0.004385016 | | 0.034895235 | | | |
| 907 | 80788 | rc_AI639324_g_at | AI639324 | 0.003628253 | | | | | |
| 908 | 80792 | rc_AI639328_at | AI639328 | 0.006796872 | | | | | |
| 909 | 80793 | rc_AI639329_at | AI639329 | 0.001601309 | | | | | |
| 910 | 80805 | rc_AI639343_at | AI639343 | 0.004818431 | | 0.032507172 | | | |
| 911 | 80831 | rc_AI639370_at | NM_001007725 | −0.000304289 | | | | | |
| 912 | 80857 | rc_AI639400_at | AI639400 | 0.000736162 | | | | | |
| 913 | 80861 | rc_AI639404_at | AI639404 | −0.001657501 | | | | | |
| 914 | 80862 | rc_AI639405_at | NM_138831 | −0.005652122 | | | | | |
| 915 | 80868 | rc_AI639411_at | NM_207614 | −0.003396882 | | | | | |
| 916 | 80870 | rc_AI639412_at | AI639412 | | | | | | 0.016763799 |
| 917 | 80888 | rc_AI639432_at | AI639432 | 0.012029347 | | | | | |
| 918 | 80018 | U38253_g_at | NM_133609 | −0.001559076 | | | | | |
| 918 | 80897 | rc_AI639441_at | NM_133609 | −0.002825786 | | | | | |
| 919 | 80901 | rc_AI639444_g_at | NM_057191 | −0.007027413 | | | | | |
| 920 | 80920 | rc_AI639461_at | AI639461 | 0.00542247 | | | | | |
| 921 | 80927 | rc_AI639467_at | AI639467 | | | | | | 0.022117874 |
| 922 | 80937 | rc_AI639476_s_at | AI639476 | 0.009529284 | | | | | |
| 923 | 80954 | rc_AI639495_at | AI639495 | −0.005609949 | | | | | |
| 924 | 80957 | rc_AI639498_i_at | AI639498 | | | | 0.001033469 | | |
| 925 | 80964 | rc_AI639505_at | AI639505 | 0.007385825 | | | | −0.005060053 | |
| 926 | 80975 | rc_AI639518_at | AI639518 | | | | | | 0.010928341 |
| 927 | 80998 | rc_AI639536_at | AI639536 | | | | | 0.010130934 | |
| 928 | 83529 | rc_H31232_at | NM_053472 | 0.002770692 | | | | | |
| 929 | 83544 | rc_H31535_at | H31535 | 0.002603161 | | | | | |
| 930 | 83545 | rc_H31550_at | H31550 | −0.005723925 | | | | | |
| 931 | 83546 | rc_H31554_at | H31554 | | | | | | −0.006893113 |
| 932 | 83549 | rc_H31597_at | NM_153294 | 0.003983892 | | | | | |
| 933 | 83556 | rc_H31692_at | NM_021597 | 0.010503007 | | | | | |
| 934 | 83572 | rc_H31887_at | H31887 | 0.006445313 | | | | | |
| 935 | 83573 | rc_H31897_at | H31897 | | | | | −0.014377454 | |
| 936 | 83578 | rc_H31964_at | H31964 | −0.006022209 | | | | | |
| 937 | 83581 | rc_H31990_at | H31990 | | | | −0.012878864 | | |
| 938 | 83587 | rc_H33084_at | H33084 | | | | | | −0.034356545 |
| 939 | 83593 | rc_H33149_at | H33149 | 0.009481038 | | | | | |
| 940 | 83611 | rc_H33528_at | H33528 | | | | | 0.001233866 | |
| 941 | 83614 | rc_H33566_at | H33566 | −5.19E−05 | | | | | |
| 942 | 83615 | rc_H33577_at | H33577 | | | | | | 0.021443999 |
| 943 | 83621 | rc_H33660_at | H33660 | | | | | 0.009762389 | |
| 944 | 78424 | S42358_s_at | NM_024372 | −0.001337475 | | | | | |
| 945 | 78426 | S43408_g_at | NM_013143 | −0.000533128 | | | | | |
| 946 | 78428 | S45663_at | NM_138549 | −0.004496789 | | | | | |
| 947 | 78435 | S46798cds#1_s_at | S46798 | | | | | | 0.012078104 |
| 948 | 78445 | S50461_s_at | NM_031034 | 0.001515439 | | | | | |
| 949 | 78452 | S53987_at | S53987 | −0.003226474 | | | | | |
| 950 | 78457 | S55427_s_at | NM_017037 | 0.005155973 | | | | | |
| 951 | 78460 | S56464mRNA_at | S56464 | −0.000220313 | | | | | |
| 951 | 78461 | S56464mRNA_g_at | S56464 | | | 0.034149288 | | | |
| 952 | 78470 | S58528_at | S58528 | −0.005722592 | | | | | |
| 953 | 78478 | S60054_s_at | NM_012642 | −0.005221152 | | 0.00080536 | | | |
| 954 | 78481 | S61868_at | NM_012649 | | −0.01753467 | | | −0.000568077 | |
| 954 | 78482 | S61868_g_at | NM_012649 | | −0.045297045 | | | | |
| 955 | 78485 | S61960_s_at | S61960 | | −0.01732857 | | | | |
| 956 | 78486 | S61973_at | NM_153308 | | | | 0.047112313 | | |
| 957 | 78489 | S62096_s_at | NM_031654 | −0.002277267 | | | | | |
| 958 | 78495 | S63233_g_at | NM_053290 | 0.009447919 | | | | | |
| 959 | 78505 | S65091_at | S65091 | | 0.022077176 | | | | |
| 960 | 78509 | S65555_at | NM_017305 | 0.00043068 | | | | | |
| 960 | 78510 | S65555_g_at | NM_017305 | 0.007007605 | | | | | |
| 961 | 78511 | S66024_at | NM_017334 | | 0.036155252 | | | 0.003518114 | |
| 961 | 78512 | S66024_g_at | NM_017334 | | −0.003171065 | −0.029872289 | | | |
| 962 | 78513 | S66184_s_at | NM_017061 | | | | | | −0.001866186 |
| 962 | 78601 | S77494_s_at | NM_017061 | | | | | | 0.000538632 |
| 963 | 78516 | S67435_s_at | NM_022852 | −0.003893561 | | | | | |
| 964 | 78521 | S67900_s_at | NM_080477 | −0.001954245 | | | | | |
| 965 | 78529 | S68809_s_at | NM_001007636 | −0.002675493 | | | | | |
| 966 | 78532 | S69160_s_at | NM_013047 | | | | | | −0.010803526 |
| 967 | 76994 | X78848cds_f_at | NM_031509 | | | | 0.03339981 | | |
| 967 | 78555 | S72505_f_at | NM_031509 | | | | 0.057415439 | | |
| 968 | 78557 | S72594_s_at | NM_021989 | | | | | | −0.024250187 |
| 969 | 78563 | S73424_s_at | NM_031051 | | | | | | 0.015474456 |
| 970 | 78569 | S74257_g_at | S74257 | | | | | | 0.044897399 |
| 971 | 78572 | S74393_s_at | NM_013001 | | | | | | −0.016408692 |
| 972 | 78574 | S74572_g_at | NM_033096 | −0.000442205 | | | | | |
| 973 | 78595 | S76466_at | NM_199230 | 0.00607669 | | | | | |
| 974 | 78602 | S77528cds_s_at | NM_024125 | 0.005201937 | | | | 0.000839527 | |
| 974 | 82411 | X60769mRNA_at | NM_024125 | | | | | −0.011509724 | |
| 975 | 78603 | S77532_at | S77532 | | | | | | −0.010610521 |
| 976 | 78604 | S77556_s_at | NM_013137 | 0.006078599 | | | | | |
| 977 | 78606 | S77858_s_at | S77858 | −0.000897916 | | | | | |
| 978 | 78616 | S78556_at | S78556 | −0.016894378 | | | | | |
| 979 | 78623 | S79304_s_at | S79304 | | | | | | 0.006510978 |
| 980 | 78629 | S79730_s_at | NM_013007 | −0.000666526 | | | | | |
| 981 | 78634 | S79820_g_at | S79820 | 0.002942637 | | | | | |
| 982 | 78638 | S80118_s_at | S80118 | 0.010652168 | | | | | |
| 983 | 78639 | S80127_s_at | NM_017044 | | | 0.037048854 | | | |
| 984 | 78642 | S80379_s_at | S80379 | 0.000302726 | | | | 0.001558153 | |
| 985 | 78644 | S80456_s_at | NM_012613 | −0.016219148 | | | | | |
| 986 | 78653 | S81497_s_at | NM_012732 | −0.007131862 | | | | | |
| 987 | 78670 | S83320_g_at | S83320 | 0.005616642 | 0.08309864 | | | | |
| 988 | 76872 | S83436_i_at | NM_181371 | 0.002778085 | | | | | |
| 989 | 78672 | S85184_at | S85184 | 0.004603081 | | | | | |
| 989 | 78673 | S85184_g_at | S85184 | 0.004912998 | | | | | |
| 990 | 78679 | S94371_at | S94371 | −0.0001861 | | | | | |
| 991 | 79818 | U02316_s_at | NM_031588 | | 0.001211732 | | | | |
| 992 | 82149 | U02522_at | NM_022588 | | | | | | 0.009394401 |
| 993 | 79758 | U03120_at | NM_013033 | −0.003674588 | | | | | |
| 994 | 79594 | U03414_s_at | NM_053573 | 0.005432627 | | | | | |
| 995 | 78694 | U03763cds_at | NM_017174 | −0.000273801 | | | | | |
| 996 | 79330 | Z15158mRNA_at | NM_013086 | −0.003755423 | | | | | |
| 996 | 79773 | U04835_at | NM_013086 | | 0.018673417 | | | | |
| 997 | 79725 | U04998_at | NM_013080 | 0.004643796 | | | | | |
| 998 | 76888 | U05014_at | NM_053857 | 0.00924054 | | | | | |
| 999 | 82060 | U05675_at | NM_020071 | | −0.039616532 | | | | |
| 1000 | 76715 | U06099_at | NM_017169 | 0.004932077 | | | | | |
| 1001 | 78701 | U06752_at | U06752 | 9.45E−05 | | | | | |
| 1002 | 82002 | U07683_at | NM_019276 | | | | | 0.020594385 | |
| 1003 | 79624 | U08256_at | NM_024379 | | | | | −0.014336002 | |
| 1004 | 82439 | U09228_at | NM_053369 | −0.008696813 | | | | | |
| 1005 | 79921 | U09229_at | U09229 | 0.003545238 | | | | | |
| 1006 | 78709 | U09401_s_at | U09401 | −0.004653404 | | 0.013006011 | | 0.00588018 | |
| 1007 | 82163 | U10188_at | NM_017100 | 0.006941681 | | | | | |
| 1008 | 79623 | U11031_at | NM_019329 | −0.001196407 | | | | | |
| 1009 | 82032 | U11760_at | NM_053864 | | | | −0.057973359 | | |
| 1010 | 79754 | U12184_at | NM_030831 | −0.009037864 | | | | | |
| 1011 | 79888 | U12514_at | NM_012982 | −0.004588803 | | | | | |
| 1012 | 82031 | U14007_at | NM_012825 | | | | −0.009184246 | | |
| 1013 | 82176 | U14746_at | NM_052801 | −0.003625967 | | | | | 0.010518562 |
| 1014 | 79659 | U17253_at | NM_022856 | −0.014157237 | | | | −0.008668048 | |
| 1015 | 76900 | U17260_s_at | NM_053853 | −0.004001843 | | | | | |
| 1016 | 79070 | X52817cds_s_at | NM_053865 | 0.000150922 | | | | | |
| 1016 | 82662 | U17604_at | NM_053865 | | | 0.023581173 | | | |
| 1017 | 82094 | U18771_at | NM_133580 | −0.006859875 | | | | | |
| 1018 | 76903 | U18982_s_at | NM_012954 | 0.006160741 | | | | | |
| 1019 | 82090 | U19614_at | NM_145092 | | | | | 0.026964762 | |
| 1020 | 78731 | U20110cds_at | NM_053325 | | | | | | −0.005958764 |
| 1021 | 79688 | U20181_at | NM_022863 | −0.000843318 | | | | | |
| 1022 | 79684 | U20283_at | NM_031126 | −0.003665817 | | | | | |
| 1023 | 76904 | U20643mRNA#2_f_at | NM_012495 | 0.00321188 | | | | | |
| 1024 | 82039 | U20796_at | NM_147210 | 0.012998993 | | | | | |
| 1025 | 78735 | U21719mRNA_s_at | U21719 | −0.004254885 | 0.008550674 | | | | |
| 1026 | 79694 | U22414_at | NM_013025 | | | | | −0.021191482 | |
| 1027 | 78739 | U23146cds_s_at | NM_057103 | 0.000175287 | 0.009241013 | | | | |
| 1027 | 78779 | U41453_at | NM_057103 | −0.003614717 | | −0.01708408 | | | −0.00122922 |
| 1028 | 82134 | U23407_at | NM_017244 | 0.002854806 | | | | | |
| 1029 | 76905 | U23438_at | NM_022199 | 0.011386763 | | | | | |
| 1030 | 82207 | U23769_at | NM_017365 | | | | | | 0.007986864 |
| 1031 | 79787 | U25137_at | NM_017064 | 0.000132489 | | | | | |
| 1032 | 78740 | U25148_at | U25148 | 0.003699688 | | | | 0.010203011 | |
| 1033 | 76731 | X05137_at | NM_012610 | 0.002392573 | | | | | |
| 1033 | 76906 | U25650_f_at | NM_012610 | 0.001053396 | | | | | |
| 1034 | 82148 | U26033_at | NM_031987 | 0.013001781 | −0.005573322 | 0.053074611 | | | |
| 1035 | 82480 | U26397_at | NM_031002 | 0.001663902 | | | | | |
| 1036 | 82848 | U30381_at | NM_031615 | −0.001718099 | | | | | |
| 1037 | 82167 | U30831_at | NM_138849 | 0.007111894 | | | | | |
| 1038 | 78749 | U31160mRNA_s_at | NM_147211 | −0.005279436 | | | −0.055561453 | | |
| 1039 | 82136 | U31777_at | NM_017228 | 0.003179515 | | | | | |
| 1040 | 78759 | U33441mRNA_s_at | NM_133513 | | | | | | 0.033915519 |
| 1041 | 79726 | U35774_at | NM_017253 | | | | | −0.011429399 | |
| 1042 | 82130 | U35775_g_at | NM_031552 | | −0.019857079 | | | | |
| 1043 | 78762 | U36444cds#1_g_at | NM_031077 | −0.001239407 | | | | | |
| 1044 | 78765 | U36771_g_at | NM_017274 | 0.005616688 | | | | | |
| 1044 | 78767 | U36773_g_at | NM_017274 | −0.000866549 | | | | | |
| 1045 | 76691 | U38376_s_at | NM_133551 | 0.007027698 | | | | | |
| 1046 | 82601 | U38481_at | NM_013022 | 0.000562126 | | | | | |
| 1047 | 78773 | U39571_at | U39571 | 0.01246326 | | | 0.077073259 | | |
| 1048 | 78775 | U39608_at | U39608 | −0.000190387 | | | | | |
| 1049 | 82520 | U39875_at | NM_024139 | 0.006814146 | | | | | |
| 1050 | 78778 | U40819_at | NM_019142 | 0.003559137 | | 0.005167997 | | | |
| 1051 | 76916 | U40836mRNA_s_at | NM_012786 | | | | | | 0.019786105 |
| 1052 | 82715 | U41845_at | NM_012991 | 0.007890622 | | | | | |
| 1053 | 76765 | U41853_at | NM_138867 | 0.012213922 | | | | | |
| 1054 | 82236 | U43534_at | NM_012894 | −0.004440377 | | | | | |
| 1055 | 78781 | U47014_at | U47014 | −0.007702328 | | | | | |
| 1056 | 80045 | U47110_at | NM_022184 | 0.009724092 | | | | | |
| 1057 | 76919 | U47313_at | U47313 | −0.000494993 | | | | | |
| 1058 | 76921 | U47315_s_at | NM_133561 | 0.002430067 | | | | | |
| 1059 | 76101 | U48220_at | NM_138515 | 0.008478977 | | | | | |
| 1060 | 76754 | U48596_at | NM_053887 | | | | | | −0.02535369 |
| 1061 | 82488 | U49099_at | U49099 | 0.006301452 | | | | | |
| 1062 | 76767 | U49930_at | NM_012922 | 0.006587665 | | | | | |
| 1063 | 80029 | U50412_at | NM_013005 | −0.006307345 | | | | | |
| 1064 | 78801 | U52034cds_i_at | NM_022175 | | | | 0.005195837 | | |
| 1065 | 78807 | U52950_g_at | U52950 | | | | | 0.017935712 | −0.005814227 |
| 1066 | 82243 | U53184_at | U53184 | | 0.02906887 | | | −0.003404813 | |
| 1067 | 82483 | U53211_at | NM_012892 | 0.002403536 | | | | | |
| 1068 | 78810 | U53486mRNA_s_at | NM_030999 | −0.001357776 | | | | | |
| 1069 | 82264 | U53513_at | U53513 | −0.000644721 | | | | | |
| 1070 | 82267 | U53706_at | NM_031062 | 0.008457699 | | | | | |
| 1071 | 78811 | U53873cds_at | U53873 | 0.00459739 | | 0.023344089 | | | |
| 1072 | 78812 | U53927_at | NM_022619 | 0.002880911 | | | | | |
| 1073 | 80031 | U55836_at | NM_031089 | −0.002679597 | | | | | |
| 1074 | 82684 | U55938_at | NM_013029 | 0.003786277 | | | | | |
| 1075 | 79994 | U56815_at | NM_031665 | −0.001724168 | | | | | |
| 1076 | 82484 | U56839_at | NM_017255 | −0.005564924 | | | | | |
| 1077 | 79952 | U57049_at | U57049 | 0.001389865 | | | | | |
| 1078 | 82524 | U57062_at | NM_134332 | | | | | | 0.007824695 |
| 1079 | 79982 | U57063_at | NM_153466 | | −0.012194139 | | | | |
| 1080 | 82577 | U59241_at | NM_013044 | | | | −0.025098723 | | |
| 1081 | 79961 | U59672_at | NM_024394 | 8.61E−05 | | −0.00879096 | | | |
| 1082 | 78834 | U62635_s_at | NM_022529 | | | | | | −0.010588194 |
| 1083 | 80063 | U62667_at | NM_031123 | −0.004933976 | | | | | |
| 1084 | 76779 | U62940_at | NM_024487 | 0.001351786 | | | | | |
| 1085 | 78836 | U63318_s_at | NM_139090 | −0.00209692 | | | | | |
| 1086 | 76927 | U64451_at | NM_013084 | −0.005934691 | | | | | |
| 1087 | 78838 | U64689_at | NM_053600 | −0.000929849 | | | | | |
| 1088 | 78839 | U64705cds_i_at | NM_001008335 | | | | −0.004614501 | | |
| 1089 | 82644 | U65656_at | NM_031054 | | | | −0.049020993 | | |
| 1090 | 78843 | U66292_at | NM_021677 | −0.00020404 | | 0.003409962 | | 0.009127421 | |
| 1091 | 78844 | U66293_at | U66293 | 0.007807538 | | | | | |
| 1092 | 78845 | U66298_at | NM_013107 | −0.005825195 | | | | | |
| 1093 | 80068 | U66322_at | NM_138863 | | | | −0.067823809 | | |
| 1094 | 80054 | U66478_at | NM_013130 | 0.002558296 | | | | | |
| 1095 | 80074 | U67082_at | NM_019620 | 0.006478937 | | | | | |
| 1096 | 78848 | U67207_s_at | NM_012596 | −0.000177436 | | | | | |
| 1097 | 76789 | U69272_at | NM_013129 | 0.003988226 | | | | | |
| 1097 | 76790 | U69272_g_at | NM_013129 | 0.005737444 | | | | | |
| 1098 | 80122 | U69279_at | NM_053903 | 0.002938354 | | | | | |
| 1099 | 82847 | U70050_at | U70050 | 0.008357922 | | | | | |
| 1100 | 76931 | U71089cds_at | NM_019310 | −0.000796698 | | | | | |
| 1101 | 82581 | U72660_at | NM_012867 | | −0.011364006 | | | | |
| 1102 | 80319 | U72741_at | NM_012977 | 0.005034962 | | | | | |
| 1102 | 80320 | U72741_g_at | NM_012977 | | | | −0.000528661 | | |
| 1103 | 80181 | U72995_at | NM_053585 | −0.00259883 | | | | | |
| 1104 | 78872 | U75412cds_at | U75412 | | | | | 0.014749423 | |
| 1105 | 76936 | U75899mRNA_at | NM_130431 | | | | | | 0.048034537 |
| 1106 | 82650 | U75916_at | U75916 | | | | 0.050010261 | | |
| 1107 | 82651 | U75917_at | NM_022952 | | | | 0.047012933 | | |
| 1108 | 78873 | U75920_at | NM_138509 | −0.002439169 | | | | | |
| 1109 | 78874 | U75921UTR#1_at | U75921 | | | | | 0.008321447 | |
| 1110 | 78875 | U75923cds_at | U75923 | 0.004677647 | | | | | |
| 1111 | 80287 | U77583_at | NM_053615 | 0.010314532 | | | | | |
| 1112 | 78894 | U77829mRNA_i_at | U77829 | −0.000711711 | | | | | |
| 1113 | 82606 | U77918_at | NM_031595 | | | | −0.041646417 | | |
| 1114 | 78895 | U77931_at | NM_147136 | 0.012664645 | | | | | |
| 1115 | 78902 | U79568_s_at | NM_133289 | −0.001213537 | | | | | |
| 1116 | 78903 | U79661_at | NM_022203 | 0.010440387 | | 0.046066235 | | | |
| 1117 | 76822 | U80054_at | NM_031053 | 0.004864799 | | | | | |
| 1118 | 78905 | U81035_s_at | NM_053909 | −0.002670014 | | | | | |
| 1118 | 78906 | U81036_s_at | NM_053909 | −0.008232535 | | | | | |
| 1119 | 78907 | U81186_at | NM_032066 | | | | 0.146208724 | | 0.042869392 |
| 1120 | 82945 | U82591_at | NM_133525 | | | | | | −0.011108871 |
| 1121 | 82913 | U83230_at | NM_013217 | −0.009024953 | | | | | |
| 1122 | 78914 | U83666_at | U83666 | 0.005410489 | | | | | |
| 1123 | 78916 | U83880UTR#1_at | NM_012736 | 0.00584112 | | | | | |
| 1124 | 82640 | U83896_at | NM_053911 | −0.002391643 | | | | | |
| 1125 | 78919 | U84727_at | NM_022398 | −0.001254714 | | | | | |
| 1126 | 78921 | U85513_at | NM_031666 | −0.000355632 | | | | | |
| 1127 | 78922 | U87305_at | NM_022206 | 0.012616272 | | | | | |
| 1128 | 78923 | U87306_at | NM_022207 | −0.002893647 | | | | | |
| 1129 | 82660 | U87983_at | NM_012964 | | | | | | −0.008506524 |
| 1130 | 78933 | U90261UTR#1_g_at | NM_053360 | | | | | 0.016533905 | |
| 1131 | 78936 | U90725_s_at | NM_172039 | | | | | 0.027645792 | |
| 1132 | 78938 | U90829_g_at | NM_032072 | | | | −0.004520698 | | −0.034862989 |
| 1133 | 78942 | U92081mRNA_s_at | NM_019358 | 0.002315315 | | | | | |
| 1134 | 80203 | U92564_g_at | NM_053583 | 0.007525417 | | | | | |
| 1135 | 80300 | U92803_at | NM_078621 | | | | | | −0.034725037 |
| 1136 | 78945 | U93052_s_at | NM_031828 | −0.00443885 | | | | | |
| 1137 | 80188 | U94330_at | NM_012870 | | | | | 0.000178218 | |
| 1138 | 82933 | U94904_s_at | NM_173143 | −0.002352342 | | | | | |
| 1139 | 78949 | U95001UTR#1_s_at | NM_053598 | −0.007983856 | | | | | |
| 1140 | 80253 | U95178_s_at | NM_024159 | | | | | 0.014214131 | |
| 1141 | 82570 | X02361_at | NM_012493 | 0.000524006 | | | | | |
| 1142 | 76948 | X02904cds_s_at | NM_138974 | 0.006002078 | | | | | |
| 1143 | 82357 | X02918_at | NM_012998 | −0.000927548 | | | | | |
| 1144 | 78968 | X03914mergedCDS_UTR_at | X03914 | 0.010902466 | | | | | |
| 1145 | 82436 | X04070_at | NM_017251 | 0.012008931 | | | | | |
| 1146 | 82384 | X05300_at | NM_013067 | −0.0035316 | | | | | |
| 1147 | 78974 | X06150cds_at | NM_017084 | | | | | | 0.020312412 |
| 1148 | 76736 | X06827_at | NM_013168 | 0.007975354 | | | | | |
| 1149 | 78981 | X06832cds#2_s_at | NM_021655 | 0.006901494 | | 0.036723844 | | | |
| 1150 | 78982 | X06889cds_at | NM_013018 | 0.006109385 | | | | | |
| 1151 | 82354 | X06916_at | NM_012618 | | | | | 0.025351832 | |
| 1152 | 78984 | X06984cds_s_at | NM_012497 | | | 0.007419575 | | | |
| 1153 | 78986 | X07259cds_s_at | NM_153307 | −0.001729941 | | −4.78E−05 | | | |
| 1154 | 79012 | X13905cds_g_at | NM_001008370 | | | | 0.012453977 | | |
| 1155 | 76958 | X13933_s_at | NM_031969 | −0.006289804 | | | | | |
| 1156 | 79025 | X14848cds#12_at | X14848 | 0.008799836 | | | | | |
| 1157 | 82350 | X15679_at | NM_173301 | | | | | | −0.002819969 |
| 1158 | 76963 | X15705cds_at | NM_021863 | | | | | 0.029887704 | |
| 1159 | 76722 | X16072_at | NM_012937 | | | | | | −0.043514095 |
| 1160 | 79044 | X16623cds_s_at | X16623 | | | | | | −0.021202041 |
| 1161 | 79048 | X17053cds_s_at | NM_031530 | | 0.016501536 | | | 0.011364152 | |
| 1161 | 79049 | X17053mRNA_s_at | NM_031530 | | 0.026013864 | | | 0.011488311 | |
| 1162 | 79051 | X17607cds_s_at | NM_012492 | | | | −0.051721624 | | |
| 1163 | 79060 | X51706cds_at | NM_001007598 | | | | | | −0.003264854 |
| 1164 | 79063 | X51781cds_s_at | NM_013023 | −7.16E−05 | | | | | |
| 1165 | 76971 | X53428cds_s_at | NM_032080 | 0.00087413 | 0.003048868 | | | | |
| 1166 | 79080 | X53504cds_g_at | X53504 | −0.00210435 | | | | | |
| 1167 | 82282 | X53773_at | NM_031008 | −0.003053957 | | | | | |
| 1168 | 82301 | X54510_at | NM_053602 | | | | | | −0.034426426 |
| 1169 | 82312 | X54531mRNA_at | NM_080689 | −0.00083552 | | | | | |
| 1170 | 79087 | X54617mRNA_s_at | X54617 | | | 0.041023635 | | | |
| 1171 | 82349 | X54640_at | NM_012783 | −0.002433691 | | | | | |
| 1172 | 76974 | X54686cds_at | NM_021836 | | −0.026251747 | | | | |
| 1173 | 76750 | X54793_at | NM_022229 | | | | | | −0.010197175 |
| 1174 | 79088 | X54798cds_at | X54798 | 0.00778292 | | | | | |
| 1175 | 76748 | X55286_at | NM_013134 | −0.008323502 | | | | | |
| 1176 | 82332 | X55660_at | NM_019331 | −0.008532897 | | | | | |
| 1177 | 79929 | X55955_at | NM_012742 | −0.011108524 | | | | | |
| 1178 | 79090 | X55986mRNA_s_at | NM_017281 | −0.000706926 | | | | | |
| 1179 | 79095 | X56448mRNA_at | X56448 | −0.003310692 | | −0.011361545 | | | |
| 1180 | 82430 | X56546_at | NM_013103 | | | | | 0.002075257 | |
| 1181 | 79104 | X57432cds_s_at | NM_031838 | | 0.007322836 | | | | |
| 1182 | 79113 | X58465mRNA_at | X58465 | 0.00388684 | | | | | 0.007679724 |
| 1183 | 79115 | X58550mRNA_s_at | NM_012490 | | | | | | −0.007446424 |
| 1184 | 82525 | X58828_at | NM_053990 | | −0.049266346 | | | | |
| 1185 | 82361 | X58865mRNA_at | NM_013190 | −0.003032462 | | | | | |
| 1186 | 79118 | X59375mRNA_at | X59375 | | | | 0.036894425 | | |
| 1187 | 79123 | X59737mRNA_at | X59737 | 0.002756449 | | 0.011792466 | | 0.015190929 | |
| 1187 | 79124 | X59737mRNA_g_at | X59737 | | | | | 0.016403436 | |
| 1188 | 79127 | X59949cds_s_at | NM_052799 | −0.000372749 | | | | | |
| 1189 | 82393 | X60212_i_at | NM_201415 | 0.021341138 | | 0.100114084 | | | 0.028033565 |
| 1190 | 79132 | X60469mRNA_s_at | NM_080478 | −0.00791677 | | | | | |
| 1191 | 79133 | X60651mRNA_s_at | NM_013026 | −0.002738856 | | | | | |
| 1192 | 79145 | X62145cds_at | X62145 | −0.004481564 | | | | | |
| 1193 | 79149 | X62166cds_s_at | NM_198753 | 0.002173674 | | | | 0.014305863 | |
| 1194 | 79153 | X62325cds_f_at | X62325 | 0.005071277 | | | | | |
| 1195 | 79166 | X62950mRNA_f_at | X62950 | | 0.028975395 | | | | |
| 1196 | 79167 | X62951mRNA_s_at | X62951 | | | | | | 0.030303936 |
| 1197 | 79170 | X63369cds_at | NM_133290 | | | | | −0.0097977 | |
| 1198 | 79824 | X66974_at | NM_053988 | −0.007896364 | | | | | |
| 1199 | 82287 | X67859_at | NM_031119 | 0.012675573 | | | | | |
| 1200 | 79893 | X68191_at | NM_019268 | −0.002615368 | | | | | |
| 1201 | 76730 | X68199_at | NM_053986 | 0.006044538 | | | | | |
| 1202 | 79182 | X70667cds_at | X70667 | −0.003534526 | | | | | 0.00219665 |
| 1203 | 82425 | X71898_at | NM_134352 | −0.000757385 | 0.032590608 | | | 0.008341811 | |
| 1204 | 76720 | X72757_g_at | X72757 | | | | | | 0.001179565 |
| 1205 | 82327 | X73371_at | NM_175756 | 0.00095486 | | | | | |
| 1206 | 79185 | X73411mRNA_s_at | NM_130738 | 0.00540037 | | | | | |
| 1207 | 79186 | X74227cds_at | NM_019312 | | | | −0.038627469 | | |
| 1208 | 82545 | X74549_at | NM_024382 | 0.014304221 | | | | | |
| 1209 | 76990 | X74565cds_at | NM_022516 | 0.004744347 | | | | | |
| 1209 | 76991 | X74565cds_g_at | NM_022516 | 0.003468802 | | | | | |
| 1210 | 82406 | X74593_at | NM_017052 | 0.015370819 | | | | | |
| 1211 | 79189 | X74833cds_at | NM_012528 | 0.006777929 | | | | | −0.003344072 |
| 1212 | 79190 | X74834cds_s_at | NM_019145 | | | | | −0.000576866 | |
| 1213 | 79192 | X74836cds_s_at | NM_017194 | | | | | 0.008639081 | |
| 1214 | 79193 | X74978exon_at | X74978 | 0.000169182 | | | | | |
| 1215 | 82414 | X75856_at | X75856 | | | | | | −0.007123435 |
| 1216 | 79196 | X76452cds_s_at | NM_001005871 | −0.006065695 | | −0.006405555 | | | |
| 1217 | 79198 | X76489cds_at | X76489 | | | | | | 0.021661652 |
| 1217 | 79199 | X76489cds_g_at | X76489 | | | | | | 0.021113575 |
| 1218 | 80285 | X76724_at | NM_017304 | 0.00291018 | | | | | |
| 1219 | 82466 | X76985_at | NM_031655 | 0.016127877 | | | | | |
| 1220 | 76791 | X77209_at | NM_212546 | −0.000365968 | | | | | |
| 1221 | 80024 | X77818_at | X77818 | −0.002030349 | | | | | |
| 1222 | 82548 | X78606_at | NM_053978 | −0.002047578 | | | | | |
| 1223 | 76995 | X79081mRNA_f_at | NM_019184 | 0.001404971 | | | | | |
| 1224 | 82210 | X81193_at | NM_057144 | 0.008892347 | | | | 0.007812858 | |
| 1225 | 82331 | X82152_at | NM_080698 | 0.007546666 | | 0.000310029 | | | |
| 1226 | 82554 | X82396_at | NM_022597 | 0.003039038 | | | | | |
| 1227 | 82392 | X82445_at | NM_017271 | −0.003055175 | | | | | |
| 1228 | 82223 | X83399_at | NM_053974 | −2.02E−05 | | | | | |
| 1229 | 79218 | X83585cds_s_at | NM_031602 | | | | | | 0.02914792 |
| 1230 | 79221 | X83735exon#3_at | NM_001008889 | −0.001827724 | | 0.004172236 | | | |
| 1231 | 79993 | X84210complete_seq_s_at | NM_012988 | 0.004611015 | | | | | |
| 1232 | 79223 | X86178mRNA_at | X86178 | −0.000221159 | | | | | |
| 1233 | 80097 | X86561cds#2_at | NM_001008724 | −0.004551591 | | | | | |
| 1234 | 79228 | X89695cds_at | NM_214821 | −0.00189784 | | | | | |
| 1235 | 79229 | X89696cds_at | NM_001000363 | | | 0.012176268 | | | −0.019588878 |
| 1236 | 79239 | X89705cds_at | NM_001000502 | −0.003291795 | | | | | |
| 1237 | 82504 | X91234_at | NM_024391 | 0.00725178 | | | | | |
| 1238 | 82239 | X92069_at | NM_080780 | | −0.000829165 | | | | |
| 1239 | 82558 | X92097_at | NM_031722 | 0.009346506 | | | | | |
| 1240 | 79250 | X93219cds_s_at | NM_012896 | 0.003979532 | | | | | |
| 1241 | 79988 | X95188_at | NM_053339 | 0.002113037 | | | | | |
| 1242 | 79256 | X95990exon_s_at | NM_053619 | 0.00754288 | | | 0.028457038 | | |
| 1243 | 79257 | X96437mRNA_at | NM_212505 | −0.007439251 | −0.055662435 | | | | |
| 1244 | 77005 | X98490cds_at | NM_021582 | | | | −0.030509847 | | |
| 1245 | 79264 | X98564cds_at | NM_021697 | 0.001156352 | | | | | |
| 1246 | 79265 | X98746cds_at | NM_134329 | −0.0043652 | | | | | |
| 1247 | 77006 | Y00156cds_f_at | NM_153314 | 0.003308465 | | | | | |
| 1248 | 77007 | Y00396mRNA_at | NM_012603 | 9.11E−05 | | | | | |
| 1248 | 77008 | Y00396mRNA_g_at | NM_012603 | | −0.008270231 | | | | |
| 1249 | 79894 | Y00766_at | NM_013119 | −0.0026598 | | | | | |
| 1250 | 79281 | Y08138_at | NM_022696 | | −0.071388115 | | | | −0.007189925 |
| 1251 | 79288 | Y09453cds_at | NM_019255 | −0.000589954 | | | | | |
| 1252 | 79291 | Y10823cds_s_at | NM_053762 | | | | | 0.000334329 | |
| 1253 | 79294 | Y11489cds_at | Y11489 | −0.000597271 | | | | −6.42E−05 | |
| 1254 | 82731 | Y12635_at | NM_057213 | −0.001011873 | | | | | |
| 1255 | 82853 | Y13714_at | NM_012656 | 0.00452094 | | | | | |
| 1256 | 76378 | Y15068_at | NM_138911 | 0.000684766 | | | | | |
| 1257 | 79309 | Y17048_g_at | NM_133529 | −0.00700948 | | | | | |
| 1258 | 79319 | Z11932cds_g_at | NM_019136 | 0.000524803 | | | | | 0.008499624 |
| 1259 | 79325 | Z14118cds_at | Z14118 | −0.002399383 | | | | | |
| 1259 | 79326 | Z14118cds_g_at | Z14118 | −0.002434108 | | | | | |
| 1260 | 79327 | Z14119cds_at | NM_031525 | 0.005727558 | | | | | |
| 1261 | 82221 | Z36980_at | NM_024131 | 0.000297484 | | | | | |
| 1262 | 79349 | Z83757mRNA_at | NM_017094 | −0.002064143 | | | | | |
| 1263 | 79351 | Z83869cds_at | NM_021699 | −0.00068321 | | | | 0.00782114 | −0.017420592 |

TABLE 3

| | | | | | | | | Vascu- | |
|---|---|---|---|---|---|---|---|---|---|
| | Dose | Time | Route of | | Andrenergic | | Myocardial | lature | Heart |
| Agent | (mg/kg) | (hrs) | Administration | General | Agonist | Arrhythmia | Necrosis | Agent | Failure |
| Acyclovir | 100 | 6, 24 | Intraperitoneal | −1 | −1 | −1 | −1 | −1 | −1 |
| Adriamycin | 12 | 6, 24 | Intravenous | 1 | −1 | −1 | 1 | −1 | 1 |
| AmphotercinB | 2.5 | 6, 24 | Intravenous | 1 | −1 | 1 | −1 | −1 | Not Used |
| BICompound | 50 | 6, 24 | Oral gavage | 1 | Not Used | Not Used | Not Used | Not Used | Not Used |
| Carboplatin | 50 | 6, 24 | Intravenous | −1 | −1 | −1 | −1 | −1 | −1 |
| CCl4 | 1000 | 6, 24 | Oral gavage | −1 | −1 | −1 | −1 | −1 | −1 |
| Cisplatin | 5 | 6, 24 | Intravenous | 1 | −1 | 1 | 1 | −1 | −1 |
| Clenbuterol | 4 | 6, 24 | Subcutaneous | 1 | 1 | 1 | 1 | 1 | Not Used |
| Cyclophosphamide | 200 | 6, 24 | Intraperitoneal | 1 | −1 | −1 | −1 | −1 | 1 |
| Dantrolene | 2000 | 6 | Oral gavage | 1 | −1 | 1 | −1 | Not Used | 1 |
| Dopamine | 4 | 6, 24 | Subcutaneous | 1 | 1 | 1 | −1 | −1 | Not Used |
| Epinephrine | 1 | 6, 24 | Subcutaneous | 1 | 1 | 1 | 1 | −1 | −1 |
| Epirubicin | 12 | 6, 24 | Intravenous | 1 | −1 | 1 | −1 | −1 | 1 |
| Famotidine | 500 | 6, 24 | Intraperitoneal | 1 | −1 | 1 | −1 | −1 | −1 |
| Hydralazine | 25 | 6, 24 | Intraperitoneal | 1 | −1 | 1 | 1 | 1 | −1 |
| Ifosfamide | 100 | 6, 24 | Intraperitoneal | 1 | −1 | 1 | −1 | −1 | 1 |
| Imatinib | 200 | 6, 24 | Oral gavage | 1 | Not Used | 1 | Not Used | Not Used | 1 |
| Isoproterenol | 0.5 | 6, 24 | Subcutaneous | 1 | 1 | 1 | 1 | Not Used | Not Used |
| Minoxidil | 120 mg/L | 6, 24 | Drinking water | 1 | −1 | 1 | 1 | 1 | 1 |
| Monocrotaline | 105 | 6, 24 | Subcutaneous | 1 | Not Used | −1 | −1 | Not Used | Not Used |
| Norephinephrine | 0.5 | 6, 24 | Subcutaneous | 1 | 1 | 1 | 1 | Not Used | −1 |
| Paroxetine | 75 | 6, 24 | Oral gavage | 1 | Not Used | 1 | −1 | Not Used | Not Used |
| Pentamidine | 30 | 6, 24 | Intraperitoneal | 1 | Not Used | 1 | −1 | Not Used | −1 |
| PfizerCompound | 1000 | 6, 24 | Oral gavage | 1 | Not Used | Not Used | Not Used | Not Used | Not Used |
| Phenylpropanolamine | 64 | 6, 24 | Intraperitoneal | 1 | 1 | 1 | 1 | Not Used | −1 |
| Rosiglitazone | 180 | 6, 24 | Oral gavage | 1 | Not Used | Not Used | Not Used | Not Used | 1 |
| Temozolomide | 5 | 6, 24 | Oral gavage | −1 | Not Used | −1 | −1 | Not Used | −1 |

TABLE 4

| SEQ ID | GLGC | GenBank Acc or | | |
|---|---|---|---|---|
| NO. | ID No. | RefSeq ID No. | Gene Name | Pathway Name |
| 1 | 77058 | A03913 | | |
| 2 | 77023 | AA684963 | similar to binding protein | |
| 3 | 77024 | AA685112 | NADH dehydrogenase (ubiquinone) | (Oxidative phosphorylation, Ubiquinone |
| | | | Fe—S protein 8 (predicted) | biosynthesis) |
| 4 | 77026 | AA685376 | | |
| 5 | 77028 | NM_001012197 | tumor rejection antigen gp96 | |
| | | | (predicted) | |
| 6 | 77029 | NM_001005550 | NADH dehydrogenase (ubiquinone) | (Oxidative phosphorylation, Ubiquinone |
| | | | Fe—S protein 1, 75 kDa | biosynthesis) |
| 7 | 77030 | NM_001009672 | SMT3 suppressor of mif two 3 | (Basic Mechanisms of SUMOylation, Regulation |
| | | | homolog 1 (yeast) (predicted) | of transcriptional activity by PML, Role of Parkin |
| | | | | in the Ubiquitin-Proteasomal Pathway, |
| | | | | SUMOylation as a mechanism to modulate CtBP- |
| | | | | dependent gene responses, Sumoylation by |
| | | | | RanBP2 Regulates Transcriptional Repression) |
| 8 | 77032 | AA686870 | | |
| 9 | 82173 | NM_031091 | RAB3B, member RAS oncogene | Tight junction |
| | | | family | |
| 9 | 82174 | NM_031091 | RAB3B, member RAS oncogene | Tight junction |
| | | | family | |
| 10 | 82240 | NM_031763 | platelet-activating factor | Glycerophospholipid metabolism |
| | | | acetylhydrolase, isoform Ib, alpha | |
| | | | subunit 45 kDa | |
| 11 | 77033 | AA819943 | | |
| 12 | 77036 | AA848421 | uracil-DNA glycosylase (predicted) | |
| 13 | 77037 | NM_001009542 | similar to programmed cell death 10 | |
| 14 | 76161 | NM_212504 | heat shock 70 kD protein 1B | MAPK signaling pathway |
| 15 | 77039 | AA875509 | transformed mouse 3T3 cell double | (ATM Signaling Pathway, CTCF: First Multivalent |
| | | | minute 2 (predicted) | Nuclear Factor, Cell Cycle: G2/M Checkpoint, |
| | | | | Cell cycle, Control of of p53 Subcellular |
| | | | | Localization, HIV-I Nef: negative effector of Fas |
| | | | | and TNF, Hypoxia and p53 in the Cardiovascular |
| | | | | system, Puma and Noxa Proteins Mediate p53- |
| | | | | and Drug-induced Apoptotic Responses, |
| | | | | Sumoylation by RanBP2 Regulates |
| | | | | Transcriptional Repression, Tumor Suppressor |
| | | | | Arf Inhibits Ribosomal Biogenesis, p53 Signaling |
| | | | | Pathway) |
| 16 | 80380 | NM_022607 | MIPP65 protein | (Oxidative phosphorylation, Ubiquinone |
| | | | | biosynthesis) |
| 17 | 80197 | NM_017217 | solute carrier family 7 (cationic | |
| | | | amino acid transporter, y+ system), | |
| | | | member 3 | |
| 18 | 82747 | NM_134403 | ankyrin repeat and BTB (POZ) | |
| | | | domain containing 2 | |
| 19 | 80386 | NM_053509 | zona pellucida glycoprotein 1 | |
| 20 | 77074 | NM_032075 | growth hormone secretagogue | Neuroactive ligand-receptor interaction |
| | | | receptor | |
| 21 | 77078 | NM_021867 | fibroblast growth factor 16 | (MAPK signaling pathway, Regulation of actin |
| | | | | cytoskeleton) |
| 22 | 77080 | NM_019349 | serine/threonine kinase 2 | |
| 23 | 77082 | NM_133553 | UDP-Gal:betaGlcNAc beta 1,3- | |
| | | | galactosyltransferase, polypeptide 4 | |
| 24 | 82743 | NM_022706 | GABA(A) receptor-associated | |
| | | | protein like 2 | |
| 25 | 80343 | NM_031707 | homer homolog 1 (Drosophila) | |
| 26 | 77083 | AB003753 | | |
| 27 | 77099 | AB005541 | | |
| 28 | 82881 | NM_031635 | fucosyltransferase 2 (secretor status | (Blood group glycolipid biosynthesis-lactoseries, |
| | | | included) | Blood group glycolipid biosynthesis- |
| | | | | neolactoseries, Globoside metabolism) |
| 29 | 82878 | NM_019351 | translocator of inner mitochondrial | TIM23 Translocase |
| | | | membrane 17a (yeast) | |
| 30 | 82879 | NM_019352 | translocase of inner mitochondrial | (Bile acid biosynthesis, Butanoate metabolism, |
| | | | membrane 23 homolog (yeast) | Fructose and mannose metabolism, Galactose |
| | | | | metabolism, Glycerophospholipid metabolism, |
| | | | | Glycine, serine and threonine metabolism, Lysine |
| | | | | degradation, Nucleotide sugars metabolism, |
| | | | | TIM23 Translocase) |
| 31 | 77104 | NM_057135 | 6-phosphofructo-2-kinase/fructose- | Fructose and mannose metabolism |
| | | | 2,6-biphosphatase 3 | |
| 32 | 77105 | AB006802 | | |
| 33 | 77107 | NM_147207 | ischemia related factor vof-16 | |
| 34 | 77111 | NM_053309 | homer homolog 2 (Drosophila) | |
| 35 | 82920 | NM_031753 | activated leukocyte cell adhesion | |
| | | | molecule | |
| 36 | 77135 | NM_147135 | SH3-binding kinase | |
| 37 | 77141 | NM_019273 | potassium large conductance | |
| | | | calcium-activated channel, subfamily | |
| | | | M, beta member 1 | |
| 38 | 77155 | NM_173102 | tubulin, beta 5 | |
| 39 | 80155 | AB012233 | nuclear factor I/C | |
| 40 | 80157 | AB012234 | nuclear factor I/X | |
| 41 | 77161 | NM_024362 | aryl hydrocarbon receptor nuclear | Circadian Rhythms |
| | | | translocator-like | |
| 42 | 77162 | NM_053607 | acyl-CoA synthetase long-chain | Fatty acid metabolism |
| | | | family member 5 | |
| 43 | 77171 | NM_013030 | solute carrier family 34 (sodium | |
| | | | phosphate), member 1 | |
| 44 | 77172 | AB013454 | similar to Ac2-210 | |
| 43 | 77173 | NM_013030 | solute carrier family 34 (sodium | |
| | | | phosphate), member 1 | |
| 45 | 77178 | NM_022505 | Rhesus blood group CE and D | |
| 45 | 77179 | NM_022505 | Rhesus blood group CE and D | |
| 46 | 77190 | NM_145778 | tubulin, gamma 1 | |
| 47 | 77200 | NM_031330 | heterogeneous nuclear | (Alanine and aspartate metabolism, Arginine and |
| | | | ribonucleoprotein A/B | proline metabolism, Urea cycle and metabolism |
| | | | | of amino groups) |
| 48 | 77202 | AB017044 | | |
| 25 | 77204 | NM_031707 | homer homolog 1 (Drosophila) | |
| 49 | 77206 | NM_022953 | slit homolog 1 (Drosophila) | |
| 50 | 77215 | NM_031335 | polymerase II | (Purine metabolism, Pyrimidine metabolism, RNA |
| | | | | polymerase) |
| 51 | 77228 | AB020504 | PMF32 protein | |
| 52 | 77235 | NM_139091 | nucleoporin like 1 | Nuclear Pore Complex |
| 53 | 77239 | NM_022208 | general transcription factor 2a, 1 | (Basal transcription factors, CARM1 and |
| | | | | Regulation of the Estrogen Receptor, Chromatin |
| | | | | Remodeling by hSWI/SNF ATP-dependent |
| | | | | Complexes, Nuclear receptors coordinate the |
| | | | | activities of chromatin remodeling complexes and |
| | | | | coactivators to facilitate initiation of transcription |
| | | | | in carcinoma cells, Preinitiation Complex |
| | | | | Assembly of RNA Polymerase II at the TATA box) |
| 54 | 76391 | NM_022698 | bcl2-associated death promoter | (AKT Signaling Pathway, Amyotrophic lateral |
| | | | | sclerosis (ALS), Apoptosis, Apoptotic Signaling in |
| | | | | Response to DNA Damage, Ceramide Signaling |
| | | | | Pathway, Focal adhesion, IL-2 Receptor Beta |
| | | | | Chain in T cell Activation, Inhibition of Cellular |
| | | | | Proliferation by Gleevec, Multiple antiapoptotic |
| | | | | pathways from IGF-1R signaling lead to BAD |
| | | | | phosphorylation, Phosphoinositides and their |
| | | | | downstream targets., Ras Signaling Pathway, |
| | | | | Regulation of BAD phosphorylation, Regulation of |
| | | | | Insulin and IGF Signaling by IRS Proteins, Role |
| | | | | of nicotinic acetylcholine receptors in the |
| | | | | regulation of apoptosis, Trefoil Factors Initiate |
| | | | | Mucosal Healing) |
| 55 | 77247 | NM_030996 | opioid receptor, sigma 1 | |
| 56 | 82857 | NM_030863 | moesin | Regulation of actin cytoskeleton |
| 57 | 77252 | AF008912 | | |
| 58 | 77253 | NM_012583 | hypoxanthine guanine | Purine metabolism |
| | | | phosphoribosyl transferase | |
| 59 | 82942 | NM_053611 | nuclear protein 1 | |
| 41 | 82819 | NM_024362 | aryl hydrocarbon receptor nuclear | Circadian Rhythms |
| | | | translocator-like | |
| 60 | 80323 | NM_173315 | putative pheromone receptor (Go- | |
| | | | VN2) | |
| 61 | 80326 | NM_173130 | putative pheromone receptor (Go- | |
| | | | VN5) | |
| 62 | 77270 | NM_057136 | Epsin 1 | (Endocytotic role of NDK, Phosphins and |
| | | | | Dynamin, Stimulation of Synaptic Vesicle |
| | | | | Recycling by Nitrous Oxide) |
| 63 | 77271 | NM_019151 | growth differentiation factor 8 | |
| 64 | 77275 | NM_031768 | integrin, alpha E, epithelial- | Regulation of actin cytoskeleton |
| | | | associated | |
| 65 | 77276 | NM_053655 | dynamin 1-like | |
| 65 | 77277 | NM_053655 | dynamin 1-like | |
| 66 | 82918 | NM_030987 | guanine nucleotide binding protein, | (Activation of Csk by cAMP-dependent Protein |
| | | | beta 1 | Kinase Inhibits Signaling through the T Cell |
| | | | | Receptor, Activation of cAMP-dependent protein |
| | | | | kinase, PKA, Aspirin Blocks Signaling Pathway |
| | | | | Involved in Platelet Activation, Attenuation of |
| | | | | GPCR Signaling, Bioactive Peptide Induced |
| | | | | Signaling Pathway, Blood Pressure and RGS-2, |
| | | | | CCR3 signaling in Eosinophils, CXCR4 Signaling |
| | | | | Pathway, ChREBP regulation by carbohydrates |
| | | | | and cAMP, Corticosteroids and cardioprotection, |
| | | | | Ephrins and Ephs: forward and reverse signalling, |
| | | | | Erk1/Erk2 Mapk Signaling pathway, Formation of |
| | | | | Phagosomes and Recruitment of Endoplasmic |
| | | | | Reticulum, G-Protein Signaling Through Tubby |
| | | | | Proteins How Progesterone Initiates the Oocyte |
| | | | | Maturation, Ion Channels and Their Functional |
| | | | | Role in Vascular Endothelium, PKC-catalyzed |
| | | | | phosphorylation of inhibitory phosphoprotein of |
| | | | | myosin phosphatase, Phospholipids as signalling |
| | | | | intermediaries, Role of beta-arrestins in the |
| | | | | activation and targeting of MAP kinases, Roles of |
| | | | | beta-arrestin-dependent Recruitment of Src |
| | | | | Kinases in GPCR Signaling, Signaling Pathway |
| | | | | from G-Protein Families, The Role of Slit-Robo |
| | | | | Pathway in Axon Guidance, Thrombin signaling |
| | | | | and protease-activated receptors, beta-arrestins |
| | | | | in GPCR Desensitization, fMLP induced |
| | | | | chemokine gene expression in HMC-1 cells) |
| 67 | 76834 | NM_080397 | carbohydrate sulfotransferase 10 | |
| 68 | 77284 | NM_031771 | thrombomodulin | Complement and coagulation cascades |
| 69 | 82949 | NM_133591 | rabphilin 3A-like (without C2 | |
| | | | domains) | |
| 70 | 77286 | AF022952 | vascular endothelial growth factor B | |
| 71 | 77287 | NM_012551 | early growth response 1 | (Phosphorylation of MEK1 by cdk5/p35 down |
| | | | | regulates the MAP kinase pathway, Regulation of |
| | | | | Steroidogenesis by Orphan NuclearReceptor SF- |
| | | | | 1) |
| 72 | 77289 | AF023621 | sortilin 1 | GGA1 Adaptor Complex Pathway |
| 73 | 77291 | NM_022522 | caspase 2 | (Caspase Cascade in Apoptosis, HIV-I Nef: |
| | | | | negative effector of Fas and TNF, MAPK |
| | | | | signaling pathway, TNF/Stress Related Signaling, |
| | | | | TNFR1 Signaling Pathway) |
| 74 | 80347 | NM_031777 | upstream transcription factor 1 | |
| 75 | 80348 | AF026529 | stathmin-like 4 | |
| 76 | 77293 | AF027188 | similar to RIKEN cDNA 4933424N09 | |
| | | | (predicted) | |
| 77 | 77295 | NM_024353 | phospholipase C, beta 4 | (Calcium signaling pathway, Inositol phosphate |
| | | | | metabolism, Phosphatidylinositol signaling |
| | | | | system, Wnt signaling pathway) |
| 78 | 77298 | AF028784 | | |
| 79 | 77300 | NM_001000583 | olfactory receptor 857 (predicted) | |
| 80 | 77309 | NM_053662 | cyclin L1 | |
| 81 | 77312 | NM_134455 | chemokine (C—X3—C motif) ligand 1 | Cytokine-cytokine receptor interaction |
| 82 | 82963 | NM_019277 | SEC15-like 1 (S. cerevisiae) | |
| 83 | 82964 | NM_139043 | exocyst complex component 8 | |
| 84 | 77331 | NM_206850 | olfactory receptor 1696 | |
| 85 | 77336 | NM_022939 | syntaxin 12 | |
| 86 | 77339 | AF035952 | kinesin family member 6 | |
| 87 | 77349 | NM_031787 | homeodomain interacting protein | Phosphatidylinositol signaling system |
| | | | kinase 3 | |
| 88 | 82705 | NM_138922 | C-terminal PDZ domain ligand of | |
| | | | neuronal nitric oxide synthase | |
| 89 | 82946 | NM_131913 | X-prolyl aminopeptidase | |
| | | | (aminopeptidase P) 1, soluble | |
| 90 | 80379 | NM_053553 | synaptogyrin 2 | |
| 91 | 77354 | AF039308 | glutaminyl-peptide cyclotransferase | |
| | | | (glutaminyl cyclase) | |
| 92 | 82951 | NM_022951 | protein phosphatase 1, regulatory | |
| | | | subunit 10 | |
| 93 | 80384 | AF041107 | GTPase activating RANGAP | |
| | | | domain-like 1 | |
| 94 | 77374 | NM_171996 | 2-4-dienoyl-Coenzyme A reductase | (Purine metabolism, Pyrimidine metabolism) |
| | | | 2, peroxisomal | |
| 95 | 82965 | NM_022509 | survival of motor neuron 1, telomeric | U1snRNP Export and Import |
| 96 | 77380 | NM_031353 | voltage-dependent anion channel 1 | (Calcium signaling pathway, Mitochondrial |
| | | | | Permeability Transition Pore Complex) |
| 96 | 77381 | NM_031353 | voltage-dependent anion channel 1 | (Calcium signaling pathway, Mitochondrial |
| | | | | Permeability Transition Pore Complex) |
| 97 | 77385 | AF050214 | | |
| 98 | 77389 | NM_031593 | synaptic vesicle glycoprotein 2c | ECM-receptor interaction |
| 99 | 77395 | NM_013132 | annexin A5 | |
| 100 | 77406 | NM_181092 | synaptic Ras GTPase activating | |
| | | | protein 1 homolog (rat) | |
| 101 | 80160 | AF053987 | putative pheromone receptor V2R1 | |
| 102 | 80164 | NM_173318 | putative pheromone receptor (Go- | |
| | | | VN4) | |
| 103 | 77414 | AF055667 | | |
| 104 | 77420 | NM_022394 | scaffold attachment factor B | |
| 104 | 77421 | NM_022394 | scaffold attachment factor B | |
| 105 | 80256 | NM_031744 | solute carrier family 16, member 8 | |
| 106 | 82798 | NM_053557 | heterogeneous nuclear | |
| | | | ribonucleoprotein methyltransferase- | |
| | | | like 3 (S. cerevisiae) | |
| 98 | 77428 | NM_031593 | synaptic vesicle glycoprotein 2c | ECM-receptor interaction |
| 107 | 77438 | NM_053575 | calcineurin binding protein 1 | (Control of skeletal myogenesis by HDAC & |
| | | | | calcium/calmodulin-dependent kinase (CaMK), |
| | | | | Role of MEF2D in T-cell Apoptosis) |
| 108 | 77441 | NM_053561 | nucleosome assembly protein 1-like 1 | Nucleosome Organization |
| 109 | 77445 | NM_145091 | pyruvate dehydrogenase | |
| | | | phosphatase isoenzyme 2 | |
| 110 | 77450 | NM_022925 | protein tyrosine phosphatase, | |
| | | | receptor type, Q | |
| 111 | 82806 | NM_053563 | nuclear RNA helicase, DECD variant | |
| | | | of DEAD box family | |
| 112 | 77453 | NM_017318 | protein tyrosine kinase 2 beta | (Angiotensin II mediated activation of JNK |
| | | | | Pathway via Pyk2 dependent signaling, Bioactive |
| | | | | Peptide Induced Signaling Pathway, CXCR4 |
| | | | | Signaling Pathway, Calcium Signaling by HBx of |
| | | | | Hepatitis B virus, Calcium signaling pathway, IL-7 |
| | | | | Signal Transduction, Ion Channel and Phorbal |
| | | | | Esters Signaling Pathway, Links between Pyk2 |
| | | | | and Map Kinases, Pertussis toxin-insensitive |
| | | | | CCR5 Signaling in Macrophage, Ras- |
| | | | | Independent pathway in NK cell-mediated |
| | | | | cytotoxicity, Role of nicotinic acetylcholine |
| | | | | receptors in the regulation of apoptosis, Signaling |
| | | | | of Hepatocyte Growth Factor Receptor, Thrombin |
| | | | | signaling and protease-activated receptors) |
| 113 | 77456 | NM_024163 | brain-enriched guanylate kinase- | |
| | | | associated | |
| 114 | 77460 | NM_031756 | gamma-glutamyl carboxylase | Purine metabolism |
| 115 | 77473 | NM_024483 | adrenergic receptor, alpha 1d | Calcium signaling pathway |
| 116 | 77480 | AF072892 | chondroitin sulfate proteoglycan 2 | |
| 117 | 77481 | NM_022692 | RAB5A, member RAS oncogene | (Formation of Phagosomes and Recruitment of |
| | | | family | Endoplasmic Reticulum Phosphoinositides and |
| | | | | their downstream targets., Rab GTPases Mark |
| | | | | Targets In The Endocytotic Machinery, The role |
| | | | | of FYVE-finger proteins in vesicle transport) |
| 118 | 77483 | NM_133610 | potassium voltage-gated channel, | |
| | | | subfamily H (eag-related), member 5 | |
| 119 | 77491 | NM_134406 | phosphofurin acidic cluster sorting | |
| | | | protein 1 | |
| 119 | 77493 | NM_134406 | phosphofurin acidic cluster sorting | |
| | | | protein 1 | |
| 120 | 77494 | NM_031623 | growth factor receptor bound protein | |
| | | | 14 | |
| 121 | 77496 | NM_057204 | protein tyrosine phosphatase, non- | |
| | | | receptor type 23 | |
| 121 | 77497 | NM_057204 | protein tyrosine phosphatase, non- | |
| | | | receptor type 23 | |
| 122 | 77507 | NM_173293 | olfactory receptor 59 | |
| 123 | 77518 | NM_019211 | RAS guanyl releasing protein 1 | MAPK signaling pathway |
| 124 | 77530 | NM_019289 | actin related protein 2/3 complex, | (How Progesterone Initiates the Oocyte |
| | | | subunit 1B | Maturation, How does salmonella hijack a cell, |
| | | | | Listeria-Induced Signal Transduction, Regulation |
| | | | | of actin cytoskeleton, Rho cell motility signaling |
| | | | | pathway, Role of PI3K subunit p85 in regulation |
| | | | | of Actin Organization and Cell Migration, Role of |
| | | | | syndapins in vesicle trafficking, Y branching of |
| | | | | actin filaments) |
| 124 | 77531 | NM_019289 | actin related protein 2/3 complex, | (How Progesterone Initiates the Oocyte |
| | | | subunit 1B | Maturation, How does salmonella hijack a cell, |
| | | | | Listeria-Induced Signal Transduction, Regulation |
| | | | | of actin cytoskeleton, Rho cell motility signaling |
| | | | | pathway, Role of PI3K subunit p85 in regulation |
| | | | | of Actin Organization and Cell Migration, Role of |
| | | | | syndapins in vesicle trafficking, Y branching of |
| | | | | actin filaments) |
| 125 | 77537 | NM_053666 | delta-like 3 (Drosophila) | Notch signaling pathway |
| 126 | 77546 | NM_019290 | B-cell translocation gene 3 | |
| 127 | 77548 | NM_031749 | glucosidase 1 | N-Glycan biosynthesis |
| 128 | 77551 | NM_031597 | potassium voltage-gated channel, | |
| | | | subfamily Q, member 3 | |
| 129 | 77565 | NM_138535 | glutamate receptor interacting | |
| | | | protein 2 | |
| 130 | 77572 | NM_031816 | retinoblastoma binding protein 7 | |
| 131 | 77576 | NM_001000504 | olfactory receptor 37 | |
| 132 | 77577 | NM_001000507 | olfactory receptor 337 | |
| 133 | 77582 | NM_001006598 | olfactory receptor 1362 | |
| 134 | 77583 | NM_001000724 | olfactory receptor 1468 | |
| 135 | 77591 | NM_001000979 | olfactory receptor 1370 (predicted) | |
| 136 | 77595 | AF091580 | carboxypeptidase X 1 (M14 family) | |
| | | | (predicted) | |
| 137 | 77603 | NM_053665 | A kinase (PRKA) anchor protein 1 | |
| 25 | 77607 | NM_031707 | homer homolog 1 (Drosophila) | |
| 138 | 77625 | NM_022690 | ubiquitin-conjugating enzyme E2G 1 | (Parkinson's disease, Role of Parkin in the |
| | | | (UBC7 homolog, C. elegans) | Ubiquitin-Proteasomal Pathway, Ubiquitin |
| | | | | mediated proteolysis) |
| 139 | 77643 | NM_171990 | 3′(2′),5′-bisphosphate nucleotidase | |
| 140 | 80387 | NM_021997 | cytoplasmic linker 2 | |
| 141 | 77645 | NM_031514 | Janus kinase 2 | (Bioactive Peptide Induced Signaling Pathway, |
| | | | | Chaperones modulate interferon Signaling |
| | | | | Pathway, EPO Signaling Pathway, Erythropoietin |
| | | | | mediated neuroprotection through NE-kB, |
| | | | | Evasion of Innate Immunity by Protozoan |
| | | | | Parasites, Growth Hormone Signaling Pathway, |
| | | | | ICAM-1 in signal transduction, IFN gamma |
| | | | | signaling pathway, IL 3 signaling pathway, IL 6 |
| | | | | signaling pathway, IL12 and Stat4 Dependent |
| | | | | Signaling Pathway in Th1 Development, IL22 |
| | | | | Soluble Receptor Signaling Pathway, Inhibition of |
| | | | | Cellular Proliferation by Gleevec, Jak-STAT |
| | | | | signaling pathway, NO2-dependent IL 12 |
| | | | | Pathway in NK cells, Regulation of Inducible |
| | | | | Nitric Oxide Synthase by Interleukin-17, |
| | | | | Regulation of Insulin and IGF Signaling by IRS |
| | | | | Proteins, Stat3 Signaling Pathway, TPO Signaling |
| | | | | Pathway) |
| 142 | 77648 | NM_053715 | solute carrier family 5 (inositol | |
| | | | transporters), member 3 | |
| 143 | 77649 | NM_053301 | hemochromatosis | |
| 144 | 77651 | NM_013004 | phosphate regulating gene with | |
| | | | homologies to endopeptidases on | |
| | | | the X chromosome | |
| 145 | 76426 | AJ002942 | retinoic acid receptor, beta | |
| 146 | 77660 | NM_053349 | SRY-box containing gene 11 | |
| 147 | 77666 | NM_134452 | collagen, type V, alpha 1 | |
| 148 | 77670 | NM_021842 | endosulfine alpha | |
| 149 | 76430 | AJ006070 | recombination activating gene 1 | |
| 150 | 77676 | NM_024154 | amiloride-sensitive cation channel 2, | |
| | | | neuronal | |
| 151 | 77684 | NM_057143 | fertility protein SP22 | Parkinson's disease |
| 151 | 77685 | NM_057143 | fertility protein SP22 | Parkinson's disease |
| 152 | 77686 | NM_133567 | centaurin, alpha 1 | |
| 153 | 77690 | NM_145095 | potassium voltage-gated channel, | |
| | | | subfamily H, member 8 | |
| 154 | 77699 | NM_021838 | nitric oxide synthase 3, endothelial | (Actions of Nitric Oxide in the Heart, Arginine and |
| | | | cell | proline metabolism, Caveolin Based Estrogen |
| | | | | Signalling, Caveolin-Assisted eNOS Activation, |
| | | | | Corticosteroids and cardioprotection, Hypoxia- |
| | | | | Inducible Factor in the Cardiovascular System, |
| | | | | Ion Channels and Their Functional Role in |
| | | | | Vascular Endothelium, VEGF, Hypoxia, and |
| | | | | Angiogenesis) |
| 154 | 77700 | NM_021838 | nitric oxide synthase 3, endothelial | (Actions of Nitric Oxide in the Heart, Arginine and |
| | | | cell | proline metabolism, Caveolin Based Estrogen |
| | | | | Signalling, Caveolin-Assisted eNOS Activation, |
| | | | | Corticosteroids and cardioprotection, Hypoxia- |
| | | | | Inducible Factor in the Cardiovascular System, |
| | | | | Ion Channels and Their Functional Role in |
| | | | | Vascular Endothelium, VEGF, Hypoxia, and |
| | | | | Angiogenesis) |
| 155 | 77704 | NM_053480 | polymerase (DNA directed), alpha 2 | (DNA polymerase, Purine metabolism, Pyrimidine |
| | | | | metabolism) |
| 156 | 77708 | NM_031700 | claudin 3 | Tight junction |
| 157 | 77709 | AJ011811 | claudin 7 | Tight junction |
| 158 | 77713 | NM_020306 | a disintegrin and metalloproteinase | (Notch signaling pathway, Presenilin action in |
| | | | domain 17 (tumor necrosis factor, | Notch and Wnt signaling, Proteolysis and |
| | | | alpha, converting enzyme) | Signaling Pathway of Notch, g-Secretase |
| | | | | mediated ErbB4 Signaling Pathway) |
| 158 | 77714 | NM_020306 | a disintegrin and metalloproteinase | (Notch signaling pathway, Presenilin action in |
| | | | domain 17 (tumor necrosis factor, | Notch and Wnt signaling, Proteolysis and |
| | | | alpha, converting enzyme) | Signaling Pathway of Notch, g-Secretase |
| | | | | mediated ErbB4 Signaling Pathway) |
| 158 | 77715 | NM_020306 | a disintegrin and metalloproteinase | (Notch signaling pathway, Presenilin action in |
| | | | domain 17 (tumor necrosis factor, | Notch and Wnt signaling, Proteolysis and |
| | | | alpha, converting enzyme) | Signaling Pathway of Notch, g-Secretase |
| | | | | mediated ErbB4 Signaling Pathway) |
| 159 | 76433 | AJ223083 | retinoid X receptor gamma | |
| 160 | 77725 | NM_133418 | solute carrier family 25 | |
| | | | (mitochondrial carrier; dicarboxylate | |
| | | | transporter), member 10 | |
| 161 | 76815 | NM_053487 | peroxisomal biogenesis factor 11A | |
| 162 | 77728 | D00092 | similar to Dihydrolipoamide | |
| | | | acetyltransferase component of | |
| | | | pyruvate dehydrogenase complex | |
| | | | (E2) (PDC-E2) (70 kDa | |
| | | | mitochondrial autoantigen of primary | |
| | | | biliary cirrhosis) (PBC) | |
| 163 | 76780 | NM_057197 | 2,4-dienoyl CoA reductase 1, | |
| | | | mitochondrial | |
| 163 | 76781 | NM_057197 | 2,4-dienoyl CoA reductase 1, | |
| | | | mitochondrial | |
| 164 | 79889 | NM_012701 | adrenergic receptor, beta 1 | (Calcium signaling pathway, Neuroactive ligand- |
| | | | | receptor interaction) |
| 165 | 77732 | NM_138877 | diaphorase 1 | Aminosugars metabolism |
| 166 | 76441 | D00688 | monoamine oxidase A | (Arginine and proline metabolism, Glycine, serine |
| | | | | and threonine metabolism, Histidine metabolism, |
| | | | | Phenylalanine metabolism, Tryptophan |
| | | | | metabolism, Tyrosine metabolism) |
| 167 | 79598 | NM_017306 | dodecenoyl-coenzyme A delta | Fatty acid metabolism |
| | | | isomerase | |
| 168 | 81799 | NM_031531 | Serine protease inhibitor | |
| 169 | 77738 | NM_032617 | RAB11B, member RAS oncogene | |
| | | | family | |
| 170 | 82782 | NM_031095 | renin binding protein | Aminosugars metabolism |
| 171 | 82255 | NM_017127 | choline kinase alpha | (Glycerophospholipid metabolism, Glycine, serine |
| | | | | and threonine metabolism) |
| 172 | 77749 | NM_031044 | histamine N-methyltransferase | Histidine metabolism |
| 173 | 77751 | NM_017237 | ubiquitin carboxy-terminal hydrolase | Parkinson's disease |
| | | | L1 | |
| 174 | 77759 | NM_017283 | proteasome (prosome, macropain) | Proteasome |
| | | | subunit, alpha type 6 | |
| 175 | 77765 | D10853 | phosphoribosyl pyrophosphate | (Glutamate metabolism, Purine metabolism) |
| | | | amidotransferase | |
| 176 | 77769 | NM_053586 | cytochrome c oxidase subunit Vb | Oxidative phosphorylation |
| 177 | 77771 | NM_030845 | chemokine (C—X—C motif) ligand 1 | |
| 178 | 77781 | NM_057102 | solute carrier family 25 | Calcium signaling pathway |
| | | | (mitochondrial carrier; adenine | |
| | | | nucleotide translocator), member 5 | |
| 179 | 77785 | D12978 | POU domain, class 2, transcription | |
| | | | factor 1 | |
| 180 | 77786 | NM_019383 | ATP synthase, H+ transporting, | (ATP synthesis, Oxidative phosphorylation) |
| | | | mitochondrial F0 complex, subunit d | |
| 181 | 77787 | NM_012915 | ATPase inhibitor | |
| 182 | 77790 | NM_133556 | ATP synthase, H+ transporting, | (ATP synthesis, Oxidative phosphorylation) |
| | | | mitochondrial F0 complex, subunit c | |
| | | | (subunit 9), isoform 2 | |
| 183 | 77796 | NM_031563 | nuclease sensitive element binding | Transcriptional activation of dbpb from mRNA |
| | | | protein 1 | |
| 184 | 82850 | NM_024349 | adenylate kinase 1 | Purine metabolism |
| 185 | 77798 | NM_024360 | hairy and enhancer of split 1 | Notch signaling pathway |
| | | | (Drosophila) | |
| 186 | 82035 | NM_012764 | GATA binding protein 1 | Hemoglobin''s Chaperone |
| 187 | 77800 | D13556 | | |
| 188 | 77801 | NM_001008280 | similar to ribosome-binding protein | |
| | | | p34 —rat (predicted) | |
| 189 | 82985 | NM_022395 | peptidase (mitochondrial processing) | |
| | | | beta | |
| 190 | 77807 | NM_053327 | chloride channel K1 | |
| 190 | 77808 | NM_053327 | chloride channel K1 | |
| 191 | 77810 | NM_017102 | solute carrier family 2 (facilitated | Vitamin C in the Brain |
| | | | glucose transporter), member 3 | |
| 192 | 77811 | NM_022920 | glutamate receptor, metabotropic 6 | Neuroactive ligand-receptor interaction |
| 193 | 77816 | NM_031719 | chloride channel, nucleotide- | |
| | | | sensitive, 1A | |
| 194 | 76448 | NM_171992 | cyclin D1 | (BTG family proteins and cell cycle regulation, |
| | | | | CARM1 and Regulation of the Estrogen |
| | | | | Receptor, Cell Cycle: G1/S Check Point, Cell |
| | | | | cycle, Cyclins and Cell Cycle Regulation, Focal |
| | | | | adhesion, Inactivation of Gsk3 by AKT causes |
| | | | | accumulation of b-catenin in Alveolar |
| | | | | Macrophages, Influence of Ras and Rho proteins |
| | | | | on G1 to S Transition, Jak-STAT signaling |
| | | | | pathway, Migration Inhibitory Factor (MIF) in |
| | | | | Signalling and Cell Cycle Progression, Oncogene |
| | | | | Inactivation of p21 Tumor Suppressor, Signaling |
| | | | | Network Regulating Bone Morphogenesis, WNT |
| | | | | Signaling Pathway, Wnt signaling pathway, p53 |
| | | | | Signaling Pathway) |
| 195 | 77817 | NM_019236 | hairy and enhancer of split 2 | |
| | | | (Drosophila) | |
| 196 | 77819 | NM_057139 | heterogeneous nuclear | |
| | | | ribonucleoprotein U | |
| 197 | 82979 | NM_138538 | testicular dynamin | |
| 198 | 77828 | NM_017309 | protein phospatase 3, regulatory | (Apoptosis, MAPK signaling pathway, Wnt |
| | | | subunit B, alpha isoform, type 1 | signaling pathway) |
| 199 | 82030 | NM_030861 | Alpha-1,3-mannosyl-glycoprotein 2- | N-Glycan biosynthesis |
| | | | beta-N- | |
| | | | acetylglucosaminyltransferase | |
| 200 | 77839 | NM_012704 | prostaglandin E receptor 3 (subtype | (Calcium signaling pathway, Neuroactive ligand- |
| | | | EP3) | receptor interaction) |
| 200 | 77840 | NM_012704 | prostaglandin E receptor 3 (subtype | (Calcium signaling pathway, Neuroactive ligand- |
| | | | EP3) | receptor interaction) |
| 201 | 77842 | NM_031040 | glutamate receptor, metabotropic 7 | Neuroactive ligand-receptor interaction |
| 202 | 82056 | NM_013053 | tyrosine 3- | (Cell Cycle: G2/M Checkpoint, Chaperone —Raf |
| | | | monooxygenase/tryptophan 5- | Molecular Interactions) |
| | | | monooxygenase activation protein, | |
| | | | theta polypeptide | |
| 203 | 76462 | NM_017284 | proteasome (prosome, macropain) | Proteasome |
| | | | subunit, beta type 2 | |
| 204 | 77855 | NM_031715 | phosphofructokinase, muscle | (Fructose and mannose metabolism, Galactose |
| | | | | metabolism, Glycolysis/Gluconeogenesis, |
| | | | | Pentose phosphate pathway) |
| 205 | 76463 | D25233 | retinoblastoma 1 | (BTG family proteins and cell cycle regulation, |
| | | | | Cell Cycle: G1/S Check Point, Cell cycle, |
| | | | | Chaperones modulate interferon Signaling |
| | | | | Pathway, Cyclin E Destruction Pathway, Cyclins |
| | | | | and Cell Cycle Regulation, E2F1 Destruction |
| | | | | Pathway, FAS signaling pathway (CD95), HIV-I |
| | | | | Nef: negative effector of Fas and TNF, Human |
| | | | | Cytomegalovirus and Map Kinase Pathways, |
| | | | | Influence of Ras and Rho proteins on G1 to S |
| | | | | Transition, Mechanism of Gene Regulation by |
| | | | | Peroxisome Proliferators via PPARa(alpha), |
| | | | | Migration Inhibitory Factor (MIF) in Signalling and |
| | | | | Cell Cycle Progression, Overview of telomerase |
| | | | | RNA component gene hTerc Transcriptional |
| | | | | Regulation, RB Tumor Suppressor/Checkpoint |
| | | | | Signaling in response to DNA damage, |
| | | | | Regulation of p27 Phosphorylation during Cell |
| | | | | Cycle Progression, Regulation of transcriptional |
| | | | | activity by PML, TNFR1 Signaling Pathway, |
| | | | | Telomeres, Telomerase, Cellular Aging, and |
| | | | | Immortality, Tumor Suppressor Arf Inhibits |
| | | | | Ribosomal Biogenesis, p53 Signaling Pathway) |
| 206 | 77861 | NM_173103 | chloride channel Kb | |
| 207 | 77865 | D26393 | | |
| 208 | 82419 | NM_017079 | CD1d1 antigen | |
| 209 | 77881 | NM_012720 | myelin-associated oligodendrocytic | |
| | | | basic protein | |
| 210 | 77883 | NM_019122 | synaptotagmin 3 | |
| 211 | 76467 | NM_199501 | cyclin dependent kinase 2 | (Cell cycle, Phosphatidylinositol signaling system) |
| 212 | 82751 | NM_013127 | CD38 antigen | (Calcium signaling pathway, Nicotinate and |
| | | | | nicotinamide metabolism) |
| 213 | 82152 | NM_053596 | endothelin converting enzyme 1 | |
| 214 | 77893 | NM_012931 | breast cancer anti-estrogen | (CXCR4 Signaling Pathway, Cell to Cell Adhesion |
| | | | resistance 1 | Signaling, Focal adhesion, Integrin Signaling |
| | | | | Pathway, Links between Pyk2 and Map Kinases, |
| | | | | PTEN dependent cell cycle arrest and apoptosis, |
| | | | | Regulation of actin cytoskeleton, Signaling |
| | | | | Network Regulating Bone Morphogenesis) |
| 215 | 77896 | NM_019370 | ectonucleotide | (Nicotinate and nicotinamide metabolism, |
| | | | pyrophosphatase/phosphodiesterase 3 | Pantothenate and CoA biosynthesis, Purine |
| | | | | metabolism, Starch and sucrose metabolism) |
| 216 | 82555 | NM_013222 | growth factor, erv1-like | |
| 217 | 82531 | NM_017136 | squalene epoxidase | Biosynthesis of steroids |
| 218 | 79730 | D37934 | | |
| 219 | 77914 | D38036 | | |
| 220 | 77916 | NM_057105 | UDP glycosyltransferase 1 family, | (Androgen and estrogen metabolism, Pentose |
| | | | polypeptide A6 | and glucuronate interconversions, Porphyrin and |
| | | | | chlorophyll metabolism, Starch and sucrose |
| | | | | metabolism) |
| 221 | 77918 | NM_175846 | UDP glycosyltransferase 1 family, | (Androgen and estrogen metabolism, Pentose |
| | | | polypeptide A8 | and glucuronate interconversions, Porphyrin and |
| | | | | chlorophyll metabolism, Starch and sucrose |
| | | | | metabolism) |
| 222 | 77921 | D38067 | | |
| 223 | 82871 | NM_013016 | protein tyrosine phosphatase, non- | |
| | | | receptor type substrate 1 | |
| 224 | 77926 | NM_017292 | gamma-aminobutyric acid A | Neuroactive ligand-receptor interaction |
| | | | receptor, rho 2 | |
| 225 | 77929 | NM_001005330 | complement receptor related protein | Complement and coagulation cascades |
| 226 | 77931 | NM_057100 | growth arrest specific 6 | |
| 227 | 77938 | D45247 | proteasome (prosome, macropain) | Proteasome |
| | | | subunit, beta type 5 | |
| 227 | 77939 | D45247 | proteasome (prosome, macropain) | Proteasome |
| | | | subunit, beta type 5 | |
| 228 | 77945 | NM_022598 | cellular nucleic acid binding protein 1 | |
| 229 | 79794 | D45413 | protein tyrosine phosphatase, | |
| | | | receptor type, H | |
| 230 | 77948 | NM_013076 | leptin | (Cytokine-cytokine receptor interaction, Jak-STAT |
| | | | | signaling pathway, Neuroactive ligand-receptor |
| | | | | interaction, Reversal of Insulin Resistance by |
| | | | | Leptin) |
| 231 | 82654 | D49434 | arylsulfatase B | Glycosaminoglycan degradation |
| 232 | 80069 | NM_012631 | prion protein | Prion disease |
| 233 | 82653 | NM_017126 | ferredoxin 1 | |
| 234 | 82514 | NM_033236 | proteasome (prosome, macropain) | Proteasome |
| | | | 26S subunit, ATPase 2 | |
| 235 | 82516 | NM_057122 | proteasome (prosome, macropain) | Proteasome |
| | | | 26S subunit, ATPase, 4 | |
| 236 | 82515 | NM_057123 | peptidase (prosome, macropain) | Proteasome |
| | | | 26S subunit, ATPase 1 | |
| 237 | 76786 | NM_057125 | peroxisomal biogenesis factor 6 | Peroxisome Biogenesis and Matrix Protein Import |
| 238 | 76837 | NM_024153 | ferredoxin reductase | |
| 239 | 82703 | NM_013032 | solute carrier family 1 | |
| | | | (neuronal/epithelial high affinity | |
| | | | glutamate transporter, system Xag), | |
| | | | member 1 | |
| 240 | 80296 | NM_022185 | phosphatidylinositol 3-kinase, | (Apoptosis, Focal adhesion, Jak-STAT signaling |
| | | | regulatory subunit, polypeptide 2 | pathway, Phosphatidylinositol signaling system, |
| | | | | Regulation of actin cytoskeleton, Toll-like receptor |
| | | | | signaling pathway) |
| 241 | 82225 | NM_053594 | protein tyrosine phosphatase, | (Erk1/Erk2 Mapk Signaling pathway, MAPK |
| | | | receptor type, R | signaling pathway) |
| 242 | 77970 | NM_022211 | fibroblast growth factor 5 | (MAPK signaling pathway, Regulation of actin |
| | | | | cytoskeleton) |
| 243 | 80129 | NM_019326 | neurogenic differentiation 2 | |
| 244 | 82508 | NM_019161 | cadherin 22 | |
| 245 | 79979 | NM_013040 | ATP-binding cassette, sub-family C | |
| | | | (CFTR/MRP), member 9 | |
| 246 | 77984 | D84485 | ADP-ribosylhydrolase like 2 | |
| | | | (predicted) | |
| 247 | 82892 | NM_053623 | acyl-CoA synthetase long-chain | Fatty acid metabolism |
| | | | family member 4 | |
| 248 | 77988 | NM_134449 | protein kinase C, delta binding | |
| | | | protein | |
| 248 | 77989 | NM_134449 | protein kinase C, delta binding | |
| | | | protein | |
| 249 | 76759 | NM_012985 | NADH dehydrogenase (ubiquinone) | (Oxidative phosphorylation, Ubiquinone |
| | | | 1 alpha subcomplex 5 | biosynthesis) |
| 250 | 82830 | D86711 | similar to mKIAA1748 protein | |
| 251 | 77993 | NM_057133 | nuclear receptor subfamily 0, group | (FXR and LXR Regulation of Cholesterol |
| | | | B, member 2 | Metabolism, Nuclear Receptors in Lipid |
| | | | | Metabolism and Toxicity, Roles of Nuclear |
| | | | | Receptors in the Regulation of Bile Acid |
| | | | | Metabolism and Cholesterol Homeostasis, The |
| | | | | Liver X Receptor as a Key Regulator of |
| | | | | Cholesterol and Lipid Metabolism, The Nuclear |
| | | | | Pregnane X Receptor as a Generalized Sensor of |
| | | | | Hydrophobic Toxins, The Role of Farnesoid X |
| | | | | Receptor (FXR) in Regulation of Bile Acid |
| | | | | Homeostasis) |
| 252 | 82643 | NM_031097 | arginyl aminopeptidase | |
| | | | (aminopeptidase B) | |
| 253 | 80119 | NM_017179 | Unc4.1 homeobox (C. elegans) | |
| 254 | 77996 | D87922 | | |
| 255 | 77997 | NM_199081 | galactose transporter | |
| 255 | 77998 | NM_199081 | galactose transporter | |
| 256 | 82666 | NM_138882 | phosphatidylserine-specific | |
| | | | phospholipase A1 | |
| 257 | 80060 | NM_013100 | prostaglandin E receptor 1 | (Calcium signaling pathway, Eicosanoid |
| | | | | Metabolism, Neuroactive ligand-receptor |
| | | | | interaction, Phospholipase C-epsilon pathway) |
| 258 | 76489 | NM_019170 | carbonyl reductase 1 | Prostaglandin and leukotriene metabolism |
| 259 | 76490 | D89070 | | |
| 260 | 82923 | NM_022585 | ornithine decarboxylase antizyme | |
| | | | inhibitor | |
| 261 | 82757 | NM_012804 | ATP-binding cassette, sub-family D | |
| | | | (ALD), member 3 | |
| 262 | 78004 | NM_017280 | proteasome (prosome, macropain) | Proteasome |
| | | | subunit, alpha type 3 | |
| 263 | 78005 | NM_017278 | proteasome (prosome, macropain) | Proteasome |
| | | | subunit, alpha type 1 | |
| 264 | 78009 | NM_017097 | cathepsin C | |
| 265 | 79398 | NM_031511 | insulin-like growth factor 2 | |
| 266 | 79394 | NM_031576 | P450 (cytochrome) oxidoreductase | |
| 267 | 79390 | NM_031512 | interleukin 1 beta | (Apoptosis, Cytokine-cytokine receptor |
| | | | | interaction, IL 5 Signaling Pathway, |
| | | | | Immunotherapeutic Approaches to Alzheimer''s |
| | | | | Disease, MAPK signaling pathway, Matrix |
| | | | | Metalloproteinase 1 in Cell Signaling, Msp/Ron |
| | | | | Receptor Signaling Pathway, NFkB activation by |
| | | | | Nontypeable Hemophilus influenzae, PPAR |
| | | | | Gamma in Inflammation Control, Role of |
| | | | | Peroxisome Proliferator-Activated Receptor in |
| | | | | Inflammation, Signal transduction through IL1R, |
| | | | | The Liver X Receptor as a Key Regulator of |
| | | | | Cholesterol and Lipid Metabolism, The Role of |
| | | | | Farnesoid X Receptor (FXR) in Regulation of Bile |
| | | | | Acid Homeostasis, Toll-like receptor signaling |
| | | | | pathway) |
| 268 | 79388 | NM_012548 | endothelin 1 | (Hypoxia-Inducible Factor in the Cardiovascular |
| | | | | System, NFAT and Hypertrophy of the heart |
| | | | | (Transcription in the broken heart), Neuroactive |
| | | | | ligand-receptor interaction, PPAR Gamma in |
| | | | | Inflammation Control, Role of EGF Receptor |
| | | | | Transactivation by GPCRs in Cardiac |
| | | | | Hypertrophy, Role of Peroxisome Proliferator- |
| | | | | Activated Receptor in Inflammation) |
| 269 | 76498 | NM_017234 | peroxisomal membrane protein 3 | Peroxisome Biogenesis and Matrix Protein Import |
| 270 | 79380 | NM_024356 | GTP cyclohydrolase 1 | Folate biosynthesis |
| 271 | 79366 | NM_031049 | lanosterol synthase | Biosynthesis of steroids |
| 272 | 79363 | NM_080886 | sterol-C4-methyl oxidase-like | |
| 273 | 79358 | NM_019284 | chondroitin sulfate proteoglycan 5 | |
| 274 | 79356 | NM_057130 | BH3 interacting (with BCL2 family) | |
| | | | domain, apoptosis agonist | |
| 275 | 79354 | NM_020542 | macrophage inflammatory protein-1 | (Cytokine-cytokine receptor interaction, Selective |
| | | | alpha receptor gene | expression of chemokine receptors during T-cell |
| | | | | polarization) |
| 276 | 76501 | J00728 | | |
| 277 | 78012 | NM_012559 | fibrinogen, gamma polypeptide | (Acute Myocardial Infarction, C-Reactive Protein, |
| | | | | Apo-B in Lipid Metabolism and Cardiovascular |
| | | | | Disease, Complement and coagulation cascades, |
| | | | | Extrinsic Prothrombin Activation Pathway, |
| | | | | Fibrinolysis Pathway, Intrinsic Prothrombin |
| | | | | Activation Pathway, Platelet thrombus formation |
| | | | | at injury sites, Role of Peroxisome Proliferator- |
| | | | | Activated Receptor in Inflammation) |
| 278 | 78017 | NM_207593 | prostatic steroid-binding protein C2 | |
| 279 | 78025 | NM_012501 | apolipoprotein C-III | |
| 280 | 79531 | NM_013024 | spermine binding protein | |
| 281 | 76104 | NM_017000 | NAD(P)H dehydrogenase, quinone 1 | (Biosynthesis of steroids, Hypoxia and p53 in the |
| | | | | Cardiovascular system) |
| 282 | 82783 | NM_031832 | lectin, galactose binding, soluble 3 | |
| 283 | 78027 | NM_031090 | RAB1, member RAS oncogene | Rab GTPases Mark Targets In The Endocytotic |
| | | | family | Machinery |
| 284 | 83017 | NM_012793 | guanidinoacetate methyltransferase | (Arginine and proline metabolism, Glycine, serine |
| | | | | and threonine metabolism, Urea cycle and |
| | | | | metabolism of amino groups) |
| 285 | 82029 | NM_012672 | thyroid hormone receptor beta | (Map Kinase Inactivation of SMRT Corepressor, |
| | | | | Neuroactive ligand-receptor interaction) |
| 286 | 82766 | NM_017290 | ATPase, Ca++ transporting, cardiac | Calcium signaling pathway |
| | | | muscle, slow twitch 2 | |
| 287 | 82122 | NM_012621 | 6-phosphofructo-2-kinase/fructose- | Fructose and mannose metabolism |
| | | | 2,6-biphosphatase 1 | |
| 288 | 79491 | NM_017038 | protein phosphatase 1A, magnesium | MAPK signaling pathway |
| | | | dependent, alpha isoform | |
| 289 | 81903 | NM_022507 | protein kinase C, zeta | (CD44-Mediated Signaling, Insulin Stimulates |
| | | | | Glucose Transport, Phosphatidylinositol signaling |
| | | | | system, Phosphoinositides and their downstream |
| | | | | targets., Regulation of Insulin and IGF Signaling |
| | | | | by IRS Proteins, Rho-family Proteins in Cell |
| | | | | Adhesion and Cancer, Tight junction) |
| 290 | 82065 | NM_017031 | phosphodiesterase 4B | Purine metabolism |
| 291 | 82978 | NM_012789 | dipeptidylpeptidase 4 | |
| 292 | 80223 | NM_012970 | potassium voltage-gated channel, | |
| | | | shaker-related subfamily, member 2 | |
| 293 | 82069 | NM_012615 | ornithine decarboxylase 1 | (Arginine and proline metabolism, Urea cycle and |
| | | | | metabolism of amino groups) |
| 294 | 78032 | NM_019130 | insulin 2 | (Control of skeletal myogenesis by HDAC & |
| | | | | calcium/calmodulin-dependent kinase (CaMK), |
| | | | | Dentatorubropallidoluysian atrophy (DRPLA), |
| | | | | Growth Hormone Signaling Pathway, Insulin |
| | | | | Signaling Pathway, Insulin Stimulates Glucose |
| | | | | Transport, Mechanism of Gene Regulation by |
| | | | | Peroxisome Proliferators via PPARa(alpha), |
| | | | | Regulation of Insulin and IGF Signaling by IRS |
| | | | | Proteins, Regulation of actin cytoskeleton, Role of |
| | | | | HNF Transcription Factors in Diabetes, The Liver |
| | | | | X Receptor as a Key Regulator of Cholesterol |
| | | | | and Lipid Metabolism) |
| 295 | 82769 | NM_012992 | nucleophosmin 1 | |
| 296 | 76874 | NM_012815 | glutamate-cysteine ligase, catalytic | (Glutamate metabolism, Glutathione metabolism) |
| | | | subunit | |
| 297 | 76521 | NM_017202 | cytochrome c oxidase subunit IV | Oxidative phosphorylation |
| | | | isoform 1 | |
| 298 | 79529 | NM_134351 | methionine adenosyltransferase II, | (Methionine metabolism, Selenoamino acid |
| | | | alpha | metabolism) |
| 299 | 81901 | NM_022676 | protein phosphatase 1, regulatory | |
| | | | (inhibitor) subunit 1A | |
| 299 | 81902 | NM_022676 | protein phosphatase 1, regulatory | |
| | | | (inhibitor) subunit 1A | |
| 300 | 81949 | NM_020075 | eukaryotic translation initiation factor 5 | (Eukaryotic protein translation, Regulation of |
| | | | | eIF2) |
| 301 | 80428 | NM_012582 | haptoglobin | |
| 302 | 81866 | NM_001009618 | RNA polymerase II transcriptional | |
| | | | coactivator | |
| 303 | 81837 | NM_017027 | myelin protein zero | |
| 304 | 78051 | NM_012604 | myosin, heavy polypeptide 3, | |
| | | | skeletal muscle, embryonic | |
| 305 | 79785 | NM_012553 | elastase 2 | Proepithelin Conversion to Epithelin and Wound |
| | | | | Repair Control |
| 306 | 78053 | NM_012729 | protease, serine, 2 | |
| 307 | 79481 | NM_013008 | POU domain, class 1, transcription | |
| | | | factor 1 | |
| 308 | 81912 | NM_012763 | protein tyrosine phosphatase, | Activation of Src by Protein-tyrosine phosphatase |
| | | | receptor type, A | alpha |
| 309 | 78057 | NM_031043 | glycogenin 1 | |
| 310 | 80221 | L02315 | calcium channel, voltage-dependent, | |
| | | | beta 4 subunit | |
| 311 | 82997 | NM_021266 | frizzled homolog 1 (Drosophila) | (ALK in cardiac myocytes, Inactivation of Gsk3 by |
| | | | | AKT causes accumulation of b-catenin in Alveolar |
| | | | | Macrophages, Multi-step Regulation of |
| | | | | Transcription by Pitx2, Presenilin action in Notch |
| | | | | and Wnt signaling, Rho-family Proteins in Cell |
| | | | | Adhesion and Cancer, Segmentation Clock, WNT |
| | | | | Signaling Pathway, Wnt signaling pathway, |
| | | | | Wnt/LRP6 Signalling) |
| 312 | 76530 | NM_012854 | interleukin 10 | (Adaptive Immune Response to Cancer Cells, |
| | | | | Antigen Dependent B Cell Activation, Cytokine |
| | | | | Network, Cytokine-cytokine receptor interaction, |
| | | | | Cytokines and Inflammatory Response, Dendritic |
| | | | | cells in regulating TH1 and TH2 Development, IL- |
| | | | | 10 Anti-inflammatory Signaling Pathway, |
| | | | | Immunotherapeutic Approaches to Alzheimer''s |
| | | | | Disease, Jak-STAT signaling pathway, PPAR |
| | | | | Gamma in Inflammation Control) |
| 313 | 76623 | NM_012598 | lipoprotein lipase | (Alzheimer's disease, C-Reactive Protein, Apo-B |
| | | | | in Lipid Metabolism and Cardiovascular Disease, |
| | | | | Glycerolipid metabolism, Low-density lipoprotein |
| | | | | (LDL) pathway during atherogenesis, Mechanism |
| | | | | of Gene Regulation by Peroxisome Proliferators |
| | | | | via PPARa(alpha), Role of PPAR-gamma |
| | | | | Coactivators in Obesity and Thermogenesis, |
| | | | | Roles of Nuclear Receptors in the Regulation of |
| | | | | Bile Acid Metabolism and Cholesterol |
| | | | | Homeostasis, Visceral Fat Deposits and the |
| | | | | Metabolic Syndrome) |
| 314 | 81888 | NM_022707 | phospholamban | Calcium signaling pathway |
| 315 | 82146 | NM_012945 | diphtheria toxin receptor | NFAT and Hypertrophy of the heart (Transcription |
| | | | | in the broken heart) |
| 316 | 79422 | L06804 | LIM homeobox protein 2 (predicted) | |
| 317 | 82020 | NM_133593 | adaptor-related protein complex 3, | |
| | | | mu 1 subunit | |
| 318 | 82021 | NM_133305 | adaptor-related protein complex 3, | |
| | | | mu 2 subunit | |
| 319 | 78074 | NM_012850 | growth hormone releasing hormone | Neuroactive ligand-receptor interaction |
| | | | receptor | |
| 320 | 78080 | L07402 | | |
| 321 | 78082 | L07408 | | |
| 322 | 78084 | L07410 | | |
| 323 | 78085 | NM_019250 | ral guanine nucleotide dissociation | Ras Signaling Pathway |
| | | | stimulator | |
| 323 | 78086 | NM_019250 | ral guanine nucleotide dissociation | Ras Signaling Pathway |
| | | | stimulator | |
| 324 | 78087 | NM_017010 | glutamate receptor, ionotropic, N- | (Calcium signaling pathway, Erythropoietin |
| | | | methyl D-aspartate 1 | mediated neuroprotection through NF-kB, |
| | | | | Ethanol-Induced Signal Transduction, LIN |
| | | | | Transport Complex, Neuregulin Receptor |
| | | | | Signaling, Neuroactive ligand-receptor |
| | | | | interaction, Nitric Oxide Signaling Pathway, |
| | | | | Stimulation of Synaptic Vesicle Recycling by |
| | | | | Nitrous Oxide, Synaptic Proteins at the Synaptic |
| | | | | Junction) |
| 325 | 78093 | NM_021841 | gamma-aminobutyric acid A | (Cardiac Protection Against ROS, Gamma- |
| | | | receptor, alpha 6 | aminobutyric Acid Receptor Life Cycle, |
| | | | | Neuroactive ligand-receptor interaction) |
| 326 | 78094 | NM_017289 | gamma-aminobutyric acid A | Neuroactive ligand-receptor interaction |
| | | | receptor, delta | |
| 327 | 82058 | NM_031723 | signal peptidase complex 18 kD | Protein export |
| 328 | 79571 | NM_017033 | phosphoglucomutase 1 | (Galactose metabolism, Glycolysis/ |
| | | | | Gluconeogenesis, Pentose phosphate pathway, |
| | | | | Starch and sucrose metabolism) |
| 329 | 82641 | NM_017076 | poliovirus receptor | CD155-Assisted Signal Transduction |
| 330 | 82726 | NM_024151 | ADP-ribosylation factor 4 | |
| 331 | 78109 | NM_019905 | annexin A2 | Caveolin-Assisted Cholesterol Transport |
| 332 | 78122 | NM_012519 | calcium/calmodulin-dependent | (Bioactive Peptide Induced Signaling Pathway, |
| | | | protein kinase II, delta | CD44-Mediated Signaling, Ca++/Calmodulin- |
| | | | | dependent Protein Kinase Activation, Calcium |
| | | | | signaling pathway, Meiotic Arrest in Oogenesis, |
| | | | | Regulation of PGC-1a, Stathmin and breast |
| | | | | cancer resistance to antimicrotubule agents, |
| | | | | Transcription factor CREB and its extracellular |
| | | | | signals, Wnt signaling pathway) |
| 333 | 78124 | NM_022392 | insulin induced gene 1 | |
| 334 | 78129 | NM_012723 | polymeric immunoglobulin receptor | |
| 335 | 78133 | NM_019220 | amino-terminal enhancer of split | |
| 336 | 78136 | NM_133559 | proprotein convertase subtilisin/kexin | |
| | | | type 4 | |
| 336 | 78137 | NM_133559 | proprotein convertase subtilisin/kexin | |
| | | | type 4 | |
| 337 | 81831 | NM_030857 | Yamaguchi sarcoma viral (v-yes-1) | (BCR Signaling Pathway, Calcium signaling |
| | | | oncogene homolog | pathway, Eph Kinases and ephrins support |
| | | | | platelet aggregation, Fc Epsilon Receptor I |
| | | | | Signaling in Mast Cells, Phosphoinositides and |
| | | | | their downstream targets., Platelet thrombus |
| | | | | formation at injury sites, Ub/Proteosome System |
| | | | | in EBV-associated Malignancies) |
| 338 | 82053 | NM_012809 | cyclic nucleotide phosphodiesterase 1 | |
| 14 | 76534 | NM_212504 | heat shock 70 kD protein 1B | MAPK signaling pathway |
| 339 | 79985 | NM_017265 | hydroxy-delta-5-steroid | (Androgen and estrogen metabolism, C21-Steroid |
| | | | dehydrogenase, 3 beta- and steroid | hormone metabolism) |
| | | | delta-isomerase 1 | |
| 340 | 76535 | NM_172008 | calnexin | |
| 341 | 81921 | NM_031093 | v-ral simian leukemia viral oncogene | (Migfilin-Mediated Actin Remodeling, Ras |
| | | | homolog A (ras related) | Signaling Pathway) |
| 342 | 80288 | NM_138511 | glypican 2 (cerebroglycan) | |
| 343 | 78149 | NM_031836 | vascular endothelial growth factor A | (Actions of Nitric Oxide in the Heart, Focal |
| | | | | adhesion, Hypoxia-Inducible Factor in the |
| | | | | Cardiovascular System, PIGF: A Key Player in |
| | | | | Pathological Angiogenesis, The Liver X Receptor |
| | | | | as a Key Regulator of Cholesterol and Lipid |
| | | | | Metabolism, VEGF, Hypoxia, and Angiogenesis) |
| 344 | 82209 | NM_019185 | GATA binding protein 6 | |
| 345 | 81900 | NM_144730 | GATA binding protein 4 | (ALK in cardiac myocytes, Hop Pathway in |
| | | | | Cardiac Development, NFAT and Hypertrophy of |
| | | | | the heart (Transcription in the broken heart), |
| | | | | Regulation of Steroidogenesis by Orphan |
| | | | | NuclearReceptor SF-1) |
| 346 | 81867 | NM_053820 | early B-cell factor 1 | |
| 347 | 79745 | L24389 | | |
| 348 | 79563 | NM_057208 | tropomyosin 3, gamma | |
| 349 | 76634 | NM_017165 | glutathione peroxidase 4 | Glutathione metabolism |
| 350 | 79650 | L24897 | myosin, heavy polypeptide 13, | |
| | | | skeletal muscle | |
| 351 | 82256 | NM_134468 | calcium/calmodulin-dependent | |
| | | | protein kinase I | |
| 352 | 82405 | L25785 | transforming growth factor beta 1 | |
| | | | induced transcript 4 | |
| 353 | 79890 | L26293 | | |
| 354 | 79592 | NM_016987 | ATP citrate lyase | (Citrate cycle (TCA cycle), Shuttle for transfer of |
| | | | | acetyl groups from mitochondria to the cytosol) |
| 355 | 80226 | L27663 | POU domain, class 3, transcription | |
| | | | factor 2 | |
| 356 | 82033 | NM_019335 | Protein kinase, interferon-inducible | (Inositol phosphate metabolism, Nicotinate and |
| | | | double stranded RNA dependent | nicotinamide metabolism, Phosphatidylinositol |
| | | | | signaling system) |
| 357 | 78173 | NM_031343 | solute carrier family 6 | |
| | | | (neurotransmitter transporter, | |
| | | | noradrenalin), member 2 | |
| 358 | 81857 | NM_012832 | cholinergic receptor, nicotinic, alpha | Calcium signaling pathway |
| | | | polypeptide 7 | |
| 359 | 78177 | NM_019297 | cholinergic receptor, nicotinic, beta | |
| | | | polypeptide 2 (neuronal) | |
| 360 | 76542 | NM_024127 | growth arrest and DNA-damage- | (ATM Signaling Pathway, Cell Cycle: G2/M |
| | | | inducible 45 alpha | Checkpoint, Cell cycle, Hypoxia and p53 in the |
| | | | | Cardiovascular system, MAPK signaling pathway, |
| | | | | p53 Signaling Pathway) |
| 361 | 78178 | NM_021860 | olfactory receptor 1654 (predicted) | |
| 362 | 82025 | NM_022502 | palmitoyl-protein thioesterase | |
| 363 | 78179 | NM_021859 | megakaryocyte-associated tyrosine | Regulation of actin cytoskeleton |
| | | | kinase | |
| 364 | 79631 | NM_024380 | guanylyl cyclase 2e | Purine metabolism |
| 365 | 79632 | NM_053831 | guanylate cyclase 2f | Purine metabolism |
| 225 | 82202 | NM_001005330 | complement receptor related protein | Complement and coagulation cascades |
| 366 | 78181 | NM_012544 | angiotensin 1 converting enzyme | Angiotensin-converting enzyme 2 regulates heart |
| | | | | function |
| 367 | 76686 | NM_019223 | NADH dehydrogenase (ubiquinone) | (Oxidative phosphorylation, Ubiquinone |
| | | | Fe—S protein 6 | biosynthesis) |
| 368 | 82063 | L39991 | nucleoporin 98 | |
| 369 | 78187 | NM_031819 | fat tumor suppressor homolog | |
| | | | (Drosophila) | |
| 370 | 78193 | L47281 | collagen, type IV, alpha 3 | ECM-receptor interaction |
| 371 | 76548 | L48209 | cytochrome c oxidase, subunit VIIIa | Oxidative phosphorylation |
| 266 | 76549 | NM_031576 | P450 (cytochrome) oxidoreductase | |
| 372 | 79441 | NM_001008830 | RT1 class I, A3 | |
| 373 | 81871 | NM_013078 | ornithine transcarbamylase | (Arginine and proline metabolism, Urea cycle and |
| | | | | metabolism of amino groups) |
| 374 | 76552 | NM_024351 | heat shock protein 8 | MAPK signaling pathway |
| 375 | 83025 | NM_017248 | heterogeneous nuclear | |
| | | | ribonucleoprotein A1 | |
| 376 | 78205 | M12335 | | |
| 377 | 80420 | NM_012767 | gonadotropin-releasing hormone 1 | Neuroactive ligand-receptor interaction |
| 378 | 81895 | NM_017036 | prolactin-like protein A | |
| 379 | 83014 | NM_138827 | solute carrier family 2 (facilitated | Vitamin C in the Brain |
| | | | glucose transporter), member 1 | |
| 380 | 81869 | NM_012881 | secreted phosphoprotein 1 | (ECM-receptor interaction, Focal adhesion) |
| 381 | 78216 | NM_017158 | cytochrome P450, family 2, | (Fatty acid metabolism, Tryptophan metabolism) |
| | | | subfamily c, polypeptide 7 | |
| 382 | 82685 | NM_019286 | alcohol dehydrogenase 1 | (Bile acid biosynthesis, Fatty acid metabolism, |
| | | | | Glycerolipid metabolism, Glycolysis/ |
| | | | | Gluconeogenesis, Tyrosine metabolism) |
| 383 | 80435 | NM_178866 | insulin-like growth factor 1 | (Control of skeletal myogenesis by HDAC & |
| | | | | calcium/calmodulin-dependent kinase (CaMK), |
| | | | | Erythrocyte Differentiation Pathway, Ghrelin: |
| | | | | Regulation of Food Intake and Energy |
| | | | | Homeostasis, IGF-1 Signaling Pathway, NFAT |
| | | | | and Hypertrophy of the heart (Transcription in the |
| | | | | broken heart), Regulation of BAD |
| | | | | phosphorylation, Regulation of Insulin and IGF |
| | | | | Signaling by IRS Proteins, Skeletal muscle |
| | | | | hypertrophy is regulated via AKT/mTOR pathway, |
| | | | | The IGF-1 Receptor and Longevity) |
| 384 | 78224 | M15528 | | |
| 385 | 80267 | NM_031974 | clathrin, light polypeptide (Lca) | (Enthoprotin interactions at the trans-Golgi |
| | | | | network, GGA1 Adaptor Complex Pathway, |
| | | | | Huntington's disease, Stimulation of Synaptic |
| | | | | Vesicle Recycling by Nitrous Oxide) |
| 386 | 78226 | NM_080773 | cholinergic receptor, muscarinic 1 | (Actions of Nitric Oxide in the Heart, Agrin in |
| | | | | Postsynaptic Differentiation, Blockade of |
| | | | | Neurotransmitter Relase by Botulinum Toxin, |
| | | | | Calcium signaling pathway, G-Protein Signaling |
| | | | | Through Tubby Proteins, Neuroactive ligand- |
| | | | | receptor interaction, Regulation of actin |
| | | | | cytoskeleton) |
| 387 | 80086 | M16409 | cholinergic receptor, muscarinic 4 | |
| 388 | 79464 | NM_019162 | tachykinin 2 | Neuroactive ligand-receptor interaction |
| 389 | 78228 | M17523 | | |
| 390 | 76560 | NM_017101 | peptidylprolyl isomerase A | (Caveolin-Assisted Cholesterol Transport, IL-2 |
| | | | | Receptor Beta Chain in T cell Activation) |
| 391 | 78244 | NM_001005382 | glandular kallikrein 12, | |
| | | | submandibular/renal | |
| 392 | 82995 | NM_012953 | fos-like antigen 1 | (Bone Remodelling, Wnt signaling pathway) |
| 393 | 78248 | M20722 | proline-rich protein | |
| 394 | 78249 | M20724 | proline-rich protein | |
| 395 | 78252 | NM_012503 | asialoglycoprotein receptor 1 | |
| 396 | 79690 | NM_030875 | sodium channel, voltage-gated, type | Opiate-Induced Signal Transduction |
| | | | 1, alpha polypeptide | |
| 391 | 78259 | NM_001005382 | glandular kallikrein 12, | |
| | | | submandibular/renal | |
| 397 | 78261 | NM_023103 | Murinoglobulin 1 homolog (mouse) | |
| 398 | 78262 | NM_012488 | alpha-2-macroglobulin | (Alzheimer's disease, Complement and |
| | | | | coagulation cascades) |
| 399 | 81898 | NM_017040 | protein phosphatase 2a, catalytic | (TGF-beta signaling pathway, Tight junction, Wnt |
| | | | subunit, beta isoform | signaling pathway) |
| 400 | 78263 | NM_013046 | thyrotropin releasing hormone | Neuroactive ligand-receptor interaction |
| 401 | 81881 | NM_013151 | plasminogen activator, tissue | (Acute Myocardial Infarction, Complement and |
| | | | | coagulation cascades, Fibrinolysis Pathway, |
| | | | | Platelet Amyloid Precursor Protein Pathway) |
| 402 | 82017 | NM_012620 | serine (or cysteine) proteinase | (Activation of Plasminogen-Activator Inhibitor |
| | | | inhibitor, clade E, member 1 | (PIA-1) by NFkB, Complement and coagulation |
| | | | | cascades, Fibrinolysis Pathway, Platelet Amyloid |
| | | | | Precursor Protein Pathway) |
| 403 | 76565 | M24239 | | |
| 404 | 81820 | NM_031012 | alanyl (membrane) aminopeptidase | (Dendritic cells in regulating TH1 and TH2 |
| | | | | Development, Glutathione metabolism, SARS |
| | | | | Coronavirus Protease) |
| 405 | 78276 | NM_013101 | phosphodiesterase 4A | Purine metabolism |
| 290 | 78277 | NM_017031 | phosphodiesterase 4B | Purine metabolism |
| 406 | 79667 | NM_145775 | nuclear receptor subfamily 1, group | Circadian rhythm |
| | | | D, member 1 | |
| 407 | 78279 | NM_138507 | protein tyrosine phosphatase, | (Activation of Csk by cAMP-dependent Protein |
| | | | receptor type, C | Kinase Inhibits Signaling through the T Cell |
| | | | | Receptor, B Lymphocyte Cell Surface Molecules, |
| | | | | Lck and Fyn tyrosine kinases in initiation of TCR |
| | | | | Activation, T Cytotoxic Cell Surface Molecules, T |
| | | | | Helper Cell Surface Molecules) |
| 408 | 76660 | NM_012844 | epoxide hydrolase 1 | |
| 409 | 76569 | NM_012541 | cytochrome P450, family 1, | (Fatty acid metabolism, Mechanism of |
| | | | subfamily a, polypeptide 2 | Acetaminophen Activity and Toxicity, Nuclear |
| | | | | Receptors in Lipid Metabolism and Toxicity, |
| | | | | Tryptophan metabolism) |
| 410 | 79423 | NM_012978 | luteinizing | (Calcium signaling pathway, Neuroactive ligand- |
| | | | hormone/choriogonadotropin | receptor interaction) |
| | | | receptor | |
| 411 | 79522 | M26534 | | |
| 412 | 79457 | NM_013178 | sodium channel, voltage-gated, type | |
| | | | IV, alpha polypeptide | |
| 413 | 82027 | M26686 | | |
| 414 | 79451 | NM_019266 | sodium channel, voltage-gated, type | |
| | | | 8, alpha polypeptide | |
| 415 | 78285 | NM_147214 | alpha-2u globulin PGCL1 | |
| 416 | 76685 | NM_019360 | cytochrome c oxidase, subunit VIc | Oxidative phosphorylation |
| 417 | 81803 | NM_017071 | insulin receptor | (Adherens junction, Control of skeletal |
| | | | | myogenesis by HDAC & calcium/calmodulin- |
| | | | | dependent kinase (CaMK), |
| | | | | Dentatorubropallidoluysian atrophy (DRPLA), |
| | | | | Growth Hormone Signaling Pathway, Insulin |
| | | | | Signaling Pathway, Insulin Stimulates Glucose |
| | | | | Transport, Regulation of Insulin and IGF |
| | | | | Signaling by IRS Proteins, Role of HNF |
| | | | | Transcription Factors in Diabetes) |
| 418 | 81965 | NM_031117 | small nuclear ribonucleoprotein N | (Spliceosomal Assembly, U1snRNP Export and |
| | | | | Import) |
| 419 | 81947 | NM_017160 | ribosomal protein S6 | (Ribosome, Skeletal muscle hypertrophy is |
| | | | | regulated via AKT/mTOR pathway, mTOR |
| | | | | Signaling Pathway) |
| 420 | 81828 | NM_139257 | lymphocyte antigen 6 complex, locus B | |
| 421 | 78296 | NM_133285 | H1 histone family, member 4 | |
| 422 | 81826 | NM_017068 | lysosomal membrane glycoprotein 2 | |
| 343 | 76875 | NM_031836 | vascular endothelial growth factor A | (Actions of Nitric Oxide in the Heart, Focal |
| | | | | adhesion, Hypoxia-Inducible Factor in the |
| | | | | Cardiovascular System, PIGF: A Key Player in |
| | | | | Pathological Angiogenesis, The Liver X Receptor |
| | | | | as a Key Regulator of Cholesterol and Lipid |
| | | | | Metabolism, VEGF, Hypoxia, and Angiogenesis) |
| 423 | 79474 | NM_031975 | parathymosin | |
| 424 | 81915 | NM_012637 | protein tyrosine phosphatase, non- | Adherens junction |
| | | | receptor type 1 | |
| 425 | 81969 | NM_030656 | alanine-glyoxylate aminotransferase | (Alanine and aspartate metabolism, Glycine, |
| | | | | serine and threonine metabolism) |
| 426 | 79525 | NM_153722 | MAS-related GPR, member F | |
| 400 | 78307 | NM_013046 | thyrotropin releasing hormone | Neuroactive ligand-receptor interaction |
| 427 | 78308 | NM_031608 | glutamate receptor, ionotropic, | Neuroactive ligand-receptor interaction |
| | | | AMPA1 (alpha 1) | |
| 428 | 78312 | NM_001007597 | follicle-stimulating hormone subunit | (Neuroactive ligand-receptor interaction, |
| | | | beta | Regulation of Spermatogenesis by CREM) |
| 429 | 78315 | M37568 | | |
| 430 | 76583 | NM_178847 | cytochrome P450, family 27, | Bile acid biosynthesis |
| | | | subfamily a, polypeptide 1 | |
| 431 | 82043 | NM_017016 | histidine decarboxylase | Histidine metabolism |
| 432 | 78319 | NM_012749 | nucleolin | SARS Coronavirus Protease |
| 433 | 80414 | NM_012770 | guanylate cyclase 1, soluble, beta 2 | Purine metabolism |
| 434 | 82839 | NM_012529 | creatine kinase, brain | (Arginine and proline metabolism, Urea cycle and |
| | | | | metabolism of amino groups) |
| 435 | 79560 | NM_019353 | thyroid peroxidase | (Cytokine-cytokine receptor interaction, Jak-STAT |
| | | | | signaling pathway, Tyrosine metabolism) |
| 436 | 81907 | NM_031604 | ATPase, H+ transporting, lysosomal | (ATP synthesis, Oxidative phosphorylation) |
| | | | V0 subunit a isoform 1 | |
| 437 | 82095 | NM_022547 | formyltetrahydrofolate | One carbon pool by folate |
| | | | dehydrogenase | |
| 438 | 76805 | NM_012498 | Aldehyde reductase 1 (low Km | (Fructose and mannose metabolism, Galactose |
| | | | aldose reductase) (5.8 kb PstI | metabolism, Glycerolipid metabolism, Pentose |
| | | | fragment, probably the functional | and glucuronate interconversions, Pyruvate |
| | | | gene) | metabolism) |
| 439 | 82045 | NM_016991 | adrenergic receptor, alpha 1b | (Calcium signaling pathway, Neuroactive ligand- |
| | | | | receptor interaction, Phospholipase C d1 in |
| | | | | phospholipid associated cell signaling) |
| 440 | 82679 | NM_017259 | B-cell translocation gene 2, anti- | |
| | | | proliferative | |
| 440 | 82680 | NM_017259 | B-cell translocation gene 2, anti- | |
| | | | proliferative | |
| 410 | 78324 | NM_012978 | luteinizing | (Calcium signaling pathway, Neuroactive ligand- |
| | | | hormone/choriogonadotropin | receptor interaction) |
| | | | receptor | |
| 441 | 78325 | M61725 | upstream binding transcription | |
| | | | factor, RNA polymerase I | |
| 442 | 76661 | NM_012924 | CD44 antigen | (Adhesion Molecules on Lymphocyte, CD44 |
| | | | | Signaling Pathway, CD44-Mediated Signaling, |
| | | | | Caveolin-Assisted eNOS Activation, ECM- |
| | | | | receptor interaction, Monocyte and its Surface |
| | | | | Molecules, Neutrophil and Its Surface Molecules) |
| 443 | 76591 | NM_031138 | ubiquitin conjugating enzyme | Ubiquitin mediated proteolysis |
| 444 | 81860 | NM_001010964 | killer cell lectin-like receptor | |
| | | | subfamily B member 1A | |
| 445 | 81878 | NM_016989 | adenylate cyclase activating | Neuroactive ligand-receptor interaction |
| | | | polypeptide 1 | |
| 446 | 76654 | NM_013091 | tumor necrosis factor receptor | (Acetylation and Deacetylation of RelA in The |
| | | | superfamily, member 1a | Nucleus, Apoptosis, Ceramide Signaling |
| | | | | Pathway, Chaperones modulate interferon |
| | | | | Signaling Pathway, Cytokine-cytokine receptor |
| | | | | interaction, HIV-I Nef: negative effector of Fas |
| | | | | and TNF, Keratinocyte Differentiation, MAPK |
| | | | | signaling pathway, NF-kB Signaling Pathway, |
| | | | | Regulation of Inducible Nitric Oxide Synthase by |
| | | | | Interleukin-17, Regulation of Insulin and IGF |
| | | | | Signaling by IRS Proteins, Regulation of |
| | | | | transcriptional activity by PML, SODD/TNFR1 |
| | | | | Signaling Pathway, TNF/Stress Related |
| | | | | Signaling, TNFR1 Signaling Pathway) |
| 447 | 79660 | NM_017155 | adenosine A1 receptor | Neuroactive ligand-receptor interaction |
| 448 | 79622 | NM_012665 | synaptotagmin 2 | |
| 449 | 79518 | M64793 | | |
| 450 | 79798 | M64795 | | |
| 451 | 79431 | NM_022667 | solute carrier organic anion | |
| | | | transporter family, member 2a1 | |
| 452 | 80431 | NM_017254 | 5-hydroxytryptamine (serotonin) | (Calcium signaling pathway, Chlamydia-Induced |
| | | | receptor 2A | Signal Transduction, Neuroactive ligand-receptor |
| | | | | interaction) |
| 453 | 82760 | NM_012963 | high mobility group box 1 | |
| 454 | 79554 | NM_133514 | matrix metallopeptidase 10 | |
| 455 | 83008 | NM_031577 | growth hormone releasing hormone | Neuroactive ligand-receptor interaction |
| 456 | 81833 | NM_031731 | aldehyde dehydrogenase family 3, | (Arginine and proline metabolism, Bile acid |
| | | | subfamily A2 | biosynthesis, Butanoate metabolism, Fatty acid |
| | | | | metabolism, Glycerolipid metabolism, Glycolysis/ |
| | | | | Gluconeogenesis, Histidine metabolism, Lysine |
| | | | | degradation, Propanoate metabolism, Pyruvate |
| | | | | metabolism, Tryptophan metabolism, Valine, |
| | | | | leucine and isoleucine degradation, beta-Alanine |
| | | | | metabolism) |
| 156 | 81868 | NM_031700 | claudin 3 | Tight junction |
| 457 | 79454 | NM_012504 | ATPase, Na+/K+ transporting, alpha | |
| | | | 1 polypeptide | |
| 458 | 76598 | M74776 | | |
| 459 | 81816 | M75148 | kinesin 2 | (Rhodopsin Processing and Transport, Trafficking |
| | | | | of MAPK Signaling Modules by Kinesin I) |
| 460 | 76602 | NM_019280 | gap junction membrane channel | |
| | | | protein alpha 5 | |
| 461 | 76603 | NM_012861 | O-6-methylguanine-DNA | |
| | | | methyltransferase | |
| 462 | 82775 | NM_017277 | adaptor protein complex AP-1, beta | Enthoprotin interactions at the trans-Golgi |
| | | | 1 subunit | network |
| 463 | 82689 | NM_031007 | adenylate cyclase 2 | (Calcium signaling pathway, Opiate-Induced |
| | | | | Signal Transduction, Purine metabolism) |
| 464 | 76605 | NM_017256 | transforming growth factor, beta | (ALK in cardiac myocytes, CTCF: First Multivalent |
| | | | receptor 3 | Nuclear Factor, Role of Tob in T-cell activation) |
| 465 | 78354 | M81183 | | |
| 466 | 83033 | NM_013082 | syndecan 2 | |
| 467 | 76606 | NM_206849 | retinoid X receptor beta | |
| 468 | 82099 | NM_053997 | potassium voltage gated channel, | |
| | | | Shaw-related subfamily, member 3 | |
| 469 | 80423 | NM_023981 | colony stimulating factor 1 | (Cytokine-cytokine receptor interaction, Cytokines |
| | | | (macrophage) | and Inflammatory Response, Low-density |
| | | | | lipoprotein (LDL) pathway during atherogenesis, |
| | | | | METS affect on Macrophage Differentiation, |
| | | | | Msp/Ron Receptor Signaling Pathway, |
| | | | | Regulation of hematopoiesis by cytokines) |
| 470 | 78367 | NM_183325 | ADP-ribosylarginine hydrolase | |
| 471 | 76607 | NM_031970 | heat shock 27 kDa protein 1 | (Downregulated of MTA-3 in ER-negative Breast |
| | | | | Tumors, MAPK signaling pathway, Stress |
| | | | | Induction of HSP Regulation, p38 MAPK |
| | | | | Signaling Pathway) |
| 472 | 79498 | M86514 | proline-rich protein | |
| 473 | 82762 | NM_021740 | prothymosin alpha | |
| 474 | 76864 | NM_012883 | sulfotransferase, estrogen preferring | Androgen and estrogen metabolism |
| 475 | 80222 | NM_012560 | forkhead box G1 | |
| 476 | 78372 | M87786 | | |
| 477 | 79425 | NM_053996 | solute carrier family 6 | |
| | | | (neurotransmitter transporter, L- | |
| | | | proline), member 7 | |
| 478 | 78375 | M88488 | | |
| 479 | 78376 | NM_031112 | ribosomal protein S24 | Ribosome |
| 480 | 78382 | NM_012852 | 5-hydroxytryptamine (serotonin) | Neuroactive ligand-receptor interaction |
| | | | receptor 1D | |
| 481 | 79424 | M91234 | | |
| 482 | 82415 | NM_017161 | adenosine A2B receptor | (Calcium signaling pathway, Neuroactive ligand- |
| | | | | receptor interaction) |
| 483 | 78390 | NM_013122 | insulin-like growth factor binding | |
| | | | protein 2 | |
| 484 | 81988 | NM_017144 | troponin I, cardiac | |
| 485 | 78397 | NM_012531 | catechol-O-methyltransferase | Tyrosine metabolism |
| 486 | 81862 | NM_022869 | nucleolar and coiled-body | |
| | | | phosphoprotein 1 | |
| 487 | 76849 | NM_019623 | cytochrome P450, family 4, | (Fatty acid metabolism, Prostaglandin and |
| | | | subfamily F, polypeptide 2 | leukotriene metabolism, Tryptophan metabolism) |
| 488 | 78404 | M95791 | | |
| 489 | 82552 | NM_052798 | zinc finger protein 354A | |
| 490 | 78410 | NM_138876 | adenosine monophosphate | Purine metabolism |
| | | | deaminase 1 (isoform M) | |
| 491 | 78411 | M98826 | | |
| 492 | 78412 | NM_031573 | phosphorylase kinase gamma 1 | Calcium signaling pathway |
| 493 | 78414 | NM_012918 | calcium channel, voltage-dependent, | Calcium signaling pathway |
| | | | P/Q type, alpha 1A subunit | |
| 494 | 83628 | AA684919 | | |
| 495 | 84403 | AA799323 | pleckstrin (predicted) | |
| 496 | 84404 | AA799328 | | |
| 497 | 84405 | NM_001007634 | pelota homolog | |
| 498 | 84416 | NM_001008511 | estrogen related receptor, alpha | Regulation of PGC-1a |
| 499 | 84420 | AA799427 | similar to RIKEN cDNA 1110018J18 | |
| | | | (predicted) | |
| 500 | 84426 | AA799442 | hypothetical LOC293114 (predicted) | |
| 501 | 84440 | AA799471 | | |
| 502 | 84445 | NM_022700 | ADP-ribosylation factor-like 3 | |
| 503 | 76270 | AA799479 | NADH dehydrogenase (ubiquinone) | (Oxidative phosphorylation, Ubiquinone |
| | | | Fe—S protein 8 (predicted) | biosynthesis) |
| 504 | 84446 | AA799480 | | |
| 505 | 84450 | AA799488 | similar to D330021B20 protein | |
| | | | (predicted) | |
| 506 | 84453 | AA799495 | | |
| 507 | 81065 | NM_031545 | natriuretic peptide precursor type B | |
| 508 | 84474 | AA799534 | | |
| 509 | 84482 | AA799544 | ladinin (predicted) | |
| 510 | 84488 | AA799554 | | |
| 511 | 84491 | AA799566 | incisor protein | |
| 512 | 84521 | AA799637 | LIM and senescent cell antigen-like | |
| | | | domains 1 (predicted) | |
| 513 | 84523 | NM_001008312 | tumor differentially expressed 1 | |
| | | | (predicted) | |
| 513 | 84524 | NM_001008312 | tumor differentially expressed 1 | |
| | | | (predicted) | |
| 514 | 84529 | AA799656 | mitochondrial ribosomal protein S31 | |
| | | | (predicted) | |
| 514 | 84530 | AA799656 | mitochondrial ribosomal protein S31 | |
| | | | (predicted) | |
| 515 | 84556 | AA799724 | similar to RNA polymerase 1-3 | |
| 290 | 84558 | NM_017031 | phosphodiesterase 4B | Purine metabolism |
| 290 | 84559 | NM_017031 | phosphodiesterase 4B | Purine metabolism |
| 516 | 84576 | AA799766 | similar to Jtv1-pending protein | |
| 517 | 84577 | AA799771 | | |
| 518 | 84578 | AA799773 | filamin C, gamma (actin binding | |
| | | | protein 280) (predicted) | |
| 518 | 84579 | AA799773 | filamin C, gamma (actin binding | |
| | | | protein 280) (predicted) | |
| 519 | 84585 | NM_184049 | serine/threonine kinase 25 (STE20 | |
| | | | homolog, yeast) | |
| 520 | 84593 | AA799812 | | |
| 521 | 84603 | AA799847 | | |
| 522 | 84613 | NM_031331 | proteasome (prosome, macropain) | Proteasome |
| | | | 26S subunit, non-ATPase, 4 | |
| 375 | 84619 | NM_017248 | heterogeneous nuclear | |
| | | | ribonucleoprotein A1 | |
| 523 | 84630 | AA799992 | similar to C11orf17 protein | |
| | | | (predicted) | |
| 524 | 84638 | AA800015 | TAF10 RNA polymerase II, TATA | |
| | | | box binding protein (TBP)- | |
| | | | associated factor (predicted) | |
| 525 | 84652 | NM_001007618 | ring finger and CHY zinc finger | |
| | | | domain containing 1 | |
| 526 | 84663 | AA800175 | protein (peptidyl-prolyl cis/trans | How Progesterone Initiates the Oocyte |
| | | | isomerase) NIMA-interacting 1 | Maturation |
| | | | (predicted) | |
| 527 | 84685 | AA800222 | autocrine motility factor receptor | Ubiquitin mediated proteolysis |
| | | | (predicted) | |
| 528 | 84696 | AA800272 | mitochondrial ribosomal protein L3 | |
| | | | (predicted) | |
| 529 | 84719 | NM_022934 | DnaJ-like protein | |
| 530 | 84723 | AA800572 | sprouty homolog 1 (Drosophila) | Sprouty regulation of tyrosine kinase signals |
| | | | (predicted) | |
| 531 | 84738 | AA800651 | protein phosphatase 2, regulatory | |
| | | | subunit B (B56), alpha isoform | |
| | | | (predicted) | |
| 532 | 84740 | NM_023955 | secretory carrier membrane protein 2 | |
| 533 | 84745 | AA800678 | similar to AW046014 protein | Toll-like receptor signaling pathway |
| 534 | 84747 | AA800680 | Notch-regulated ankyrin repeat | |
| | | | protein (predicted) | |
| 535 | 84749 | AA800686 | | |
| 536 | 84761 | AA800719 | | |
| 537 | 84773 | AA800750 | | |
| 538 | 84782 | NM_031327 | cysteine rich protein 61 | |
| 344 | 84783 | NM_019185 | GATA binding protein 6 | |
| 539 | 84799 | AA800849 | | |
| 540 | 84804 | NM_001002830 | RAS-like family 11 member B | |
| 541 | 84816 | NM_001001504 | general transcription factor II I repeat | |
| | | | domain-containing 1 | |
| 542 | 81086 | NM_032057 | Inositol (myo)-1(or 4)- | (Inositol phosphate metabolism, |
| | | | monophosphatase 1 | Phosphatidylinositol signaling system) |
| 543 | 81489 | NM_053995 | 3-hydroxybutyrate dehydrogenase | (Butanoate metabolism, Synthesis and |
| | | | (heart, mitochondrial) | degradation of ketone bodies) |
| 544 | 81490 | NM_022511 | profilin 1 | (Erk and PI-3 Kinase Are Necessary for Collagen |
| | | | | Binding in Corneal Epithelia, Listeria-Induced |
| | | | | Signal Transduction, Regulation of actin |
| | | | | cytoskeleton, Rho cell motility signaling pathway) |
| 545 | 81511 | AA818025 | | |
| 546 | 81524 | NM_017355 | RAB4B, member RAS oncogene | |
| | | | family | |
| 547 | 81534 | NM_017096 | C-reactive protein, petaxin related | |
| 14 | 76160 | NM_212504 | heat shock 70 kD protein 1B | MAPK signaling pathway |
| 548 | 81600 | NM_017333 | endothelin receptor type B | (Calcium signaling pathway, Neuroactive ligand- |
| | | | | receptor interaction, Role of EGF Receptor |
| | | | | Transactivation by GPCRs in Cardiac |
| | | | | Hypertrophy) |
| 549 | 81601 | NM_012887 | thymopoietin | |
| 549 | 81602 | NM_012887 | thymopoietin | |
| 550 | 81090 | NM_017090 | guanylate cyclase 1, soluble, alpha 3 | Purine metabolism |
| 551 | 81092 | NM_053330 | ribosomal protein L21 | Ribosome |
| 552 | 81098 | NM_053891 | cyclin-dependent kinase 5, | (Deregulation of CDK5 in Alzheimers Disease, |
| | | | regulatory subunit 1 (p35) | Lissencephaly gene (LIS1) in neuronal migration |
| | | | | and development, Phosphorylation of MEK1 by |
| | | | | cdk5/p35 down regulates the MAP kinase |
| | | | | pathway, Rac 1 cell motility signaling pathway, |
| | | | | Reelin Signaling Pathway, Regulation of ck1/cdk5 |
| | | | | by type 1 glutamate receptors) |
| 553 | 81100 | NM_012857 | lysosomal membrane glycoprotein 1 | |
| 554 | 76272 | AA851403 | NADH dehydrogenase (ubiquinone) | (Oxidative phosphorylation, Ubiquinone |
| | | | 1 beta subcomplex 8 (predicted) | biosynthesis) |
| 554 | 76273 | AA851403 | NADH dehydrogenase (ubiquinone) | (Oxidative phosphorylation, Ubiquinone |
| | | | 1 beta subcomplex 8 (predicted) | biosynthesis) |
| 555 | 81797 | NM_012561 | follistatin | TGF-beta signaling pathway |
| 556 | 83046 | AA858586 | | |
| 557 | 83050 | AA858600 | leucine-zipper-like transcriptional | |
| | | | regulator, 1 (predicted) | |
| 558 | 83052 | AA858603 | similar to hypothetical protein | |
| | | | MGC20700 (predicted) | |
| 559 | 81795 | NM_173111 | tropomyosin isoform 6 | |
| 560 | 76323 | AA859372 | | |
| 561 | 83066 | NM_053555 | vesicle-associated membrane | |
| | | | protein 5 | |
| 562 | 83069 | AA859483 | | |
| 563 | 83082 | AA859533 | tubby like protein 1 (predicted) | Rhodopsin Processing and Transport |
| 564 | 83094 | NM_138518 | late gestation lung protein 1 | |
| 565 | 83099 | AA859597 | | |
| 566 | 77049 | AA859648 | DnaJ (Hsp40) homolog, subfamily B, | (Glucocorticoid Receptor-Hsp90 Heterocomplex, |
| | | | member 1 (predicted) | Rhodopsin Processing and Transport) |
| 567 | 83115 | AA859663 | similar to RIKEN cDNA 4933406J04 | |
| 568 | 83122 | AA859680 | similar to CG2662-PA (predicted) | |
| 569 | 83134 | AA859718 | similar to RIKEN cDNA A230063L24 | |
| | | | gene | |
| 570 | 83135 | AA859719 | mitochondrial ribosomal protein S14 | |
| | | | (predicted) | |
| 571 | 83138 | AA859740 | | |
| 572 | 83140 | AA859750 | | |
| 147 | 83143 | NM_134452 | collagen, type V, alpha 1 | |
| 573 | 83144 | AA859760 | | |
| 574 | 83150 | AA859804 | eukaryotic translation initiation factor | |
| | | | 4E like 3 (predicted) | |
| 575 | 83151 | NM_001012125 | lysyl oxidase-like 1 (predicted) | |
| 576 | 83152 | NM_024161 | cysteine string protein | |
| 577 | 83154 | AA859827 | uridine-cytidine kinase 2 | Pyrimidine metabolism |
| 578 | 81002 | NM_017087 | biglycan | Small Leucine-rich Proteoglycan (SLRP) |
| | | | | molecules |
| 579 | 83165 | NM_031978 | proteasome (prosome, macropain) | Proteasome |
| | | | 26S subunit, non-ATPase, 1 | |
| 580 | 83172 | NM_130426 | tumor necrosis factor receptor | (Acetylation and Deacetylation of RelA in The |
| | | | superfamily, member 1b | Nucleus, Butanoate metabolism, Chaperones |
| | | | | modulate interferon Signaling Pathway, Cytokine- |
| | | | | cytokine receptor interaction, Fatty acid |
| | | | | biosynthesis (path 2), Fatty acid metabolism, HIV- |
| | | | | I Nef: negative effector of Fas and TNF, |
| | | | | Keratinocyte Differentiation, Lysine degradation, |
| | | | | Mechanism of Gene Regulation by Peroxisome |
| | | | | Proliferators via PPARa(alpha), Multi-Drug |
| | | | | Resistance Factors, NE-kB Signaling Pathway, |
| | | | | Nuclear Receptors in Lipid Metabolism and |
| | | | | Toxicity, Propanoate metabolism, Regulation of |
| | | | | Inducible Nitric Oxide Synthase by Interleukin-17, |
| | | | | Regulation of Insulin and IGF Signaling by IRS |
| | | | | Proteins, Regulation of transcriptional activity by |
| | | | | PML, SODD/TNFR1 Signaling Pathway, TNFR2 |
| | | | | Signaling Pathway, Tryptophan metabolism, |
| | | | | Valine, leucine and isoleucine degradation, beta- |
| | | | | Alanine metabolism) |
| 581 | 83185 | AA859922 | similar to SRD5A2L (predicted) | |
| 582 | 83199 | NM_138839 | vacuole Membrane Protein 1 | |
| 583 | 83210 | AA859983 | cyclin M4 (predicted) | |
| 584 | 83214 | AA859994 | | |
| 585 | 83215 | AA859996 | | |
| 586 | 83222 | AA860024 | eukaryotic translation elongation | |
| | | | factor 1 gamma | |
| 38 | 83224 | NM_173102 | tubulin, beta 5 | |
| 587 | 83234 | NM_134326 | albumin | |
| 588 | 83235 | AA866221 | | |
| 587 | 83240 | NM_134326 | albumin | |
| 589 | 83250 | AA866272 | apoptosis, caspase activation | |
| | | | inhibitor (predicted) | |
| 590 | 83265 | AA866362 | zinc finger protein 580 (predicted) | |
| 591 | 83274 | NM_012651 | solute carrier family 4, member 1 | (Band 3-based macrocomplex in the erythrocyte |
| | | | | membrane, Membrane-cytoskeleton connections |
| | | | | in erythrocytes) |
| 592 | 83277 | AA866426 | | |
| 593 | 83281 | AA866439 | | |
| 594 | 83283 | AA866444 | Rho GTPase activating protein 10 | |
| | | | (predicted) | |
| 87 | 83287 | NM_031787 | homeodomain interacting protein | Phosphatidylinositol signaling system |
| | | | kinase 3 | |
| 595 | 83302 | AA874803 | | |
| 596 | 83305 | AA874815 | | |
| 597 | 83308 | AA874832 | anaphase-promoting complex | |
| | | | subunit 5 (predicted) | |
| 598 | 83322 | NM_017270 | alcohol dehydrogenase 4 (class II), | (Bile acid biosynthesis, Fatty acid metabolism, |
| | | | pi polypeptide | Glycerolipid metabolism, Glycolysis/ |
| | | | | Gluconeogenesis, Tyrosine metabolism) |
| 599 | 83346 | AA874952 | zinc finger protein 262 (predicted) | |
| 600 | 83354 | NM_001007703 | similar to BC002216 protein | |
| 601 | 83355 | AA874999 | Sec61 beta subunit (predicted) | |
| 602 | 83357 | AA875002 | leucine-rich repeat-containing 8 | |
| | | | (predicted) | |
| 603 | 83359 | NM_053589 | RAB14, member RAS oncogene | |
| | | | family | |
| 604 | 83360 | AA875017 | | |
| 605 | 83374 | AA875042 | LOC361774 (predicted) | |
| 606 | 83385 | NM_053295 | calpastatin | |
| 607 | 83388 | AA875098 | FK506 binding protein 11 (predicted) | |
| 608 | 83392 | NM_012866 | nuclear transcription factor-Y gamma | Overview of telomerase RNA component gene |
| | | | | hTerc Transcriptional Regulation |
| 609 | 83397 | AA875126 | | |
| 610 | 83413 | AA875165 | similar to Gamma-tubulin complex | |
| | | | component 4 (GCP-4) (hGCP4) | |
| | | | (h76p) (Hgrip76) | |
| 611 | 83415 | AA875171 | N-acetylglucosamine-1- | |
| | | | phosphotransferase, gamma subunit | |
| | | | (predicted) | |
| 611 | 83416 | AA875171 | N-acetylglucosamine-1- | |
| | | | phosphotransferase, gamma subunit | |
| | | | (predicted) | |
| 612 | 83418 | AA875182 | zinc finger protein 523 (predicted) | |
| 613 | 83423 | AA875197 | similar to 3300001A09Rik protein | |
| | | | (predicted) | |
| 614 | 83424 | NM_001008386 | notch1-induced protein | |
| 615 | 83428 | AA875205 | eukaryotic translation initiation factor | |
| | | | 3, subunit 9 (eta) (predicted) | |
| 616 | 83429 | NM_053747 | ubiquilin 1 | Gamma-aminobutyric Acid Receptor Life Cycle |
| 617 | 83443 | AA875255 | | |
| 618 | 83446 | AA875263 | microspherule protein 1 (predicted) | |
| 619 | 83450 | AA875275 | | |
| 620 | 76248 | NM_001006957 | eukaryotic translation initiation factor | |
| | | | 4H | |
| 621 | 83459 | AA875348 | | |
| 622 | 83463 | NM_001012091 | forkhead-like 18 (Drosophila) | |
| | | | (predicted) | |
| 623 | 83472 | AA875428 | similar to RIKEN cDNA 9130410M22 | |
| 624 | 83476 | AA875444 | dihydropyrimidinase-like 2 | (Pantothenate and CoA biosynthesis, Pyrimidine |
| | | | | metabolism, beta-Alanine metabolism) |
| 625 | 83480 | AA875468 | | |
| 626 | 83483 | NM_012903 | acidic (leucine-rich) nuclear | Granzyme A mediated Apoptosis Pathway |
| | | | phosphoprotein 32 family, member A | |
| 627 | 83486 | NM_053824 | casein kinase II, alpha 1 polypeptide | (Adherens junction, EGF Signaling Pathway, |
| | | | | EPO Signaling Pathway, IGF-1 Signaling |
| | | | | Pathway, IL 2 signaling pathway, IL 6 signaling |
| | | | | pathway, Insulin Signaling Pathway, |
| | | | | Lissencephaly gene (LIS1) in neuronal migration |
| | | | | and development, Nerve growth factor pathway |
| | | | | (NGF), PDGF Signaling Pathway, |
| | | | | Phosphatidylinositol signaling system, TPO |
| | | | | Signaling Pathway, Tight junction, WNT Signaling |
| | | | | Pathway, Wnt signaling pathway) |
| 628 | 83505 | AA875598 | cullin 2 (predicted) | |
| 629 | 83509 | NM_031083 | phosphatidylinositol 4-kinase, | (Inositol phosphate metabolism, |
| | | | catalytic, beta polypeptide | Phosphatidylinositol signaling system) |
| 630 | 83516 | AA875641 | | |
| 631 | 83522 | NM_001008694 | reticulocalbin 3, EF-hand calcium | |
| | | | binding domain | |
| 632 | 83635 | AA891032 | | |
| 52 | 81017 | NM_139091 | nucleoporin like 1 | Nuclear Pore Complex |
| 633 | 83642 | AA891058 | | |
| 634 | 83644 | AA891069 | serine/arginine-rich protein specific | |
| | | | kinase 2 (predicted) | |
| 635 | 83649 | AA891140 | similar to CDNA sequence | |
| | | | BC027246 (predicted) | |
| 635 | 83650 | AA891140 | similar to CDNA sequence | |
| | | | BC027246 (predicted) | |
| 636 | 83655 | AA891196 | similar to Butyrate-induced transcript 1 | |
| 637 | 83660 | NM_177928 | pre-B-cell colony enhancing factor 1 | Nicotinate and nicotinamide metabolism |
| 638 | 83661 | AA891221 | similar to RIKEN cDNA 0610007P06 | |
| 639 | 83671 | NM_031614 | thioredoxin reductase 1 | Pyrimidine metabolism |
| 640 | 83681 | AA891314 | poly(rC) binding protein 4 (predicted) | |
| 641 | 83684 | AA891356 | hypothetical LOC304650 (predicted) | |
| 642 | 83685 | NM_057186 | L-3-hydroxyacyl-Coenzyme A | (Butanoate metabolism, Fatty acid biosynthesis |
| | | | dehydrogenase, short chain | (path 2), Fatty acid metabolism, Lysine |
| | | | | degradation, Tryptophan metabolism, Valine, |
| | | | | leucine and isoleucine degradation) |
| 643 | 83688 | NM_080902 | hypoxia induced gene 1 | |
| 644 | 83689 | AA891423 | similar to hypothetical protein | |
| | | | FLJ12118 (predicted) | |
| 645 | 83698 | AA891476 | | |
| 646 | 83702 | NM_001008367 | similar to RIKEN cDNA 0610042E07 | |
| | | | (predicted) | |
| 647 | 83705 | AA891542 | DnaJ (Hsp40) homolog, subfamily B, | |
| | | | member 5 (predicted) | |
| 648 | 83708 | NM_001004283 | eukaryotic translation initiation factor | |
| | | | 3 subunit 7 | |
| 649 | 83716 | AA891588 | similar to hypothetical protein | |
| | | | E130310N06 | |
| 650 | 83718 | NM_031356 | programmed cell death 8 | (Apoptosis, Ceramide Signaling Pathway, |
| | | | | Opposing roles of AIF in Apoptosis and Cell |
| | | | | Survival, Role of Mitochondria in Apoptotic |
| | | | | Signaling) |
| 651 | 83720 | AA891596 | | |
| 652 | 83722 | NM_139332 | two pore channel 1 | |
| 653 | 83723 | AA891631 | | |
| 654 | 83729 | NM_001007804 | similar to EAP30 subunit of ELL | |
| | | | complex (predicted) | |
| 655 | 83743 | NM_173340 | ribosomal protein L13A | Ribosome |
| 656 | 83747 | AA891719 | ectonucleotide | |
| | | | pyrophosphatase/phosphodiesterase | |
| | | | 6 (predicted) | |
| 657 | 83748 | NM_001009647 | mitochondrial ribosomal protein L16 | |
| 658 | 83749 | NM_198765 | bicaudal D homolog 2 (Drosophila) | |
| 659 | 83752 | AA891727 | similar to RIKEN cDNA 2900010M23 | |
| | | | (predicted) | |
| 660 | 83757 | AA891737 | | |
| 661 | 83761 | AA891746 | endothelial differentiation-related | |
| | | | factor 1 (predicted) | |
| 662 | 81025 | NM_030827 | low density lipoprotein receptor- | |
| | | | related protein 2 | |
| 663 | 83781 | AA891810 | | |
| 663 | 83782 | AA891810 | | |
| 664 | 83797 | AA891838 | similar to ribosomal protein P0-like | |
| | | | protein; 60S acidic ribosomal protein | |
| | | | PO; ribosomal protein, large, P0-like | |
| | | | (predicted) | |
| 665 | 83800 | AA891842 | tumor necrosis factor receptor | |
| | | | superfamily, member 21 (predicted) | |
| 666 | 83803 | AA891851 | | |
| 667 | 83813 | AA891877 | | |
| 668 | 83815 | NM_022948 | sideroflexin 3 | |
| 669 | 83822 | AA891903 | | |
| 670 | 83824 | NM_001005383 | aminoacylase 1 | Urea cycle and metabolism of amino groups |
| 671 | 83825 | NM_032615 | membrane interacting protein of | |
| | | | RGS16 | |
| 671 | 83826 | NM_032615 | membrane interacting protein of | |
| | | | RGS16 | |
| 672 | 83827 | AA891917 | capping protein (actin filament) | (Listeria-Induced Signal Transduction, |
| | | | muscle Z-line, alpha 1 (predicted) | Microtubule-Organelle Interactions) |
| 673 | 83838 | AA891940 | similar to mKIAA1631 protein | |
| 674 | 83839 | AA891943 | | |
| 675 | 83846 | AA891969 | similar to small unique nuclear | Translin in Cell Signaling |
| | | | receptor co-repressor | |
| 676 | 83851 | AA892006 | ATPase, H+ transporting, V1 subunit | (ATP synthesis, Oxidative phosphorylation) |
| | | | A, isoform 1 (predicted) | |
| 677 | 83855 | NM_013177 | glutamate oxaloacetate | (Alanine and aspartate metabolism, Arginine and |
| | | | transaminase 2 | proline metabolism, Cysteine metabolism, |
| | | | | Glutamate metabolism, Phenylalanine |
| | | | | metabolism, Phenylalanine, tyrosine and |
| | | | | tryptophan biosynthesis, Tyrosine metabolism) |
| 678 | 83857 | NM_139101 | potassium channel regulator 1 | (Acetylation and Deacetylation of RelA in The |
| | | | | Nucleus, Adherens junction, BTG family proteins |
| | | | | and cell cycle regulation, CARM1 and Regulation |
| | | | | of the Estrogen Receptor, Calcium signaling |
| | | | | pathway, Cell Cycle: G1/S Check Point, Cell |
| | | | | cycle, Chaperones modulate interferon Signaling |
| | | | | Pathway, Cyclins and Cell Cycle Regulation, |
| | | | | Cytokine-cytokine receptor interaction, DNA |
| | | | | polymerase, ECM-receptor interaction, Focal |
| | | | | adhesion, Fructose and mannose metabolism, |
| | | | | Glycerophospholipid metabolism, HIV-I Nef: |
| | | | | negative effector of Fas and TNF, Inactivation of |
| | | | | Gsk3 by AKT causes accumulation of b-catenin in |
| | | | | Alveolar Macrophages, Influence of Ras and Rho |
| | | | | proteins on G1 to S Transition, Jak-STAT |
| | | | | signaling pathway, Keratinocyte Differentiation, |
| | | | | MAPK signaling pathway, Membrane- |
| | | | | cytoskeleton connections in erythrocytes, |
| | | | | Migration Inhibitory Factor (MIF) in Signalling and |
| | | | | Cell Cycle Progression, N-Glycan biosynthesis, |
| | | | | NF-kB Signaling Pathway, Neuroactive ligand- |
| | | | | receptor interaction, Oncogene Inactivation of |
| | | | | p21 Tumor Suppressor, Phosphatidylinositol |
| | | | | signaling system, Regulation of Inducible Nitric |
| | | | | Oxide Synthase by Interleukin-17, Regulation of |
| | | | | Insulin and IGF Signaling by IRS Proteins, |
| | | | | Regulation of actin cytoskeleton, Regulation of |
| | | | | transcriptional activity by PML, SODD/TNFR1 |
| | | | | Signaling Pathway, Signaling Network Regulating |
| | | | | Bone Morphogenesis, TGF-beta signaling |
| | | | | pathway, TNFR2 Signaling Pathway, Tight |
| | | | | junction, WNT Signaling Pathway, Wnt signaling |
| | | | | pathway, p53 Signaling Pathway) |
| 679 | 83861 | AA892042 | DEAD (Asp-Glu-Ala-Asp) box | |
| | | | polypeptide 3, X-linked | |
| 680 | 83862 | AA892049 | histone 1, H4j (predicted) | |
| 681 | 83871 | AA892112 | proline dehydrogenase (oxidase) 2 | |
| | | | (predicted) | |
| 682 | 83886 | AA892204 | | |
| 683 | 83888 | AA892228 | CUG triplet repeat, RNA binding | |
| | | | protein 1 (predicted) | |
| 684 | 76221 | AA892248 | | |
| 684 | 76222 | AA892248 | | |
| 685 | 83895 | NM_053524 | NADPH oxidase 4 | |
| 686 | 83912 | NM_175707 | peptidylprolyl isomerase | |
| | | | (cyclophilin)-like 3 | |
| 687 | 83917 | NM_001009666 | dynein, axonmal, light chain 4 | |
| | | | (predicted) | |
| 688 | 83919 | NM_001007707 | brain protein 16 | |
| 689 | 83922 | AA892310 | adaptor-related protein complex AP- | Enthoprotin interactions at the trans-Golgi |
| | | | 1, mu subunit 1 (predicted) | network |
| 690 | 83928 | AA892318 | ADP-ribosylation factor-like 6 | |
| | | | interacting protein 4 (predicted) | |
| 691 | 83947 | AA892378 | tetratricopeptide repeat domain 11 | |
| | | | (predicted) | |
| 692 | 83948 | AA892380 | serine palmitoyltransferase, long | |
| | | | chain base subunit 1 (predicted) | |
| 693 | 83958 | NM_198736 | potassium channel tetramerisation | |
| | | | domain containing 13 | |
| 694 | 83965 | AA892462 | | |
| 695 | 83969 | AA892470 | H2A histone family, member V | |
| | | | (predicted) | |
| 696 | 83977 | NM_001005547 | transmembrane 4 superfamily | |
| | | | member 8 | |
| 697 | 83985 | AA892520 | vesicle amine transport protein 1 | |
| | | | homolog (T californica) (predicted) | |
| 697 | 83986 | AA892520 | vesicle amine transport protein 1 | |
| | | | homolog (T californica) (predicted) | |
| 698 | 83988 | AA892526 | | |
| 699 | 76243 | NM_001004442 | thioredoxin domain containing 7 | (ATP synthesis, Emerin Assited Gene Regulation, |
| | | | | Oxidative phosphorylation) |
| 700 | 83999 | AA892551 | | |
| 701 | 84004 | NM_001007802 | chemokine-like factor super family 6 | |
| | | | (predicted) | |
| 702 | 84014 | AA892578 | similar to RIKEN cDNA 6330406I15 | |
| | | | (predicted) | |
| 703 | 84015 | AA892582 | | |
| 704 | 84016 | AA892593 | | |
| 705 | 84017 | NM_175580 | guanine nucleotide binding protein- | |
| | | | like 3 (nucleolar) | |
| 705 | 84018 | NM_175580 | guanine nucleotide binding protein- | |
| | | | like 3 (nucleolar) | |
| 706 | 84022 | AA892630 | ADP-ribosyltransferase (NAD+, | |
| | | | poly(ADP-ribose) polymerase)-like 2 | |
| | | | (predicted) | |
| 707 | 84025 | AA892635 | | |
| 708 | 84031 | AA892647 | histone 1, H4h (predicted) | |
| 709 | 81037 | NM_012771 | lysozyme | |
| 710 | 84052 | AA892779 | similar to RIKEN cDNA 3110052N05 | |
| | | | (predicted) | |
| 711 | 84069 | AA892820 | filamin, beta (predicted) | |
| 712 | 84072 | NM_001007620 | pyruvate dehydrogenase (lipoamide) | (Butanoate metabolism, Glycolysis/ |
| | | | beta | Gluconeogenesis, Pyruvate metabolism) |
| 713 | 84076 | NM_134382 | ELOVL family member 5, elongation | |
| | | | of long chain fatty acids (yeast) | |
| 714 | 84079 | NM_001007637 | mitochondrial ribosomal protein L24 | |
| 715 | 84083 | NM_001008521 | protein tyrosine kinase 9 (predicted) | |
| 716 | 84085 | NM_001009690 | rod outer segment membrane | |
| | | | protein 1 (predicted) | |
| 717 | 84089 | AA892860 | Son of sevenless homolog 1 | (Angiotensin II mediated activation of JNK |
| | | | (Drosophila) (predicted) | Pathway via Pyk2 dependent signaling, BCR |
| | | | | Signaling Pathway, Bioactive Peptide Induced |
| | | | | Signaling Pathway, Calcium Signaling by HBx of |
| | | | | Hepatitis B virus, EGF Signaling Pathway, EPO |
| | | | | Signaling Pathway, Erk1/Erk2 Mapk Signaling |
| | | | | pathway, Fc Epsilon Receptor I Signaling in Mast |
| | | | | Cells, Growth Hormone Signaling Pathway, IGF-1 |
| | | | | Signaling Pathway, IL 2 signaling pathway, IL 3 |
| | | | | signaling pathway, IL 6 signaling pathway, IL-2 |
| | | | | Receptor Beta Chain in T cell Activation, |
| | | | | Inhibition of Cellular Proliferation by Gleevec, |
| | | | | Insulin Signaling Pathway, Integrin Signaling |
| | | | | Pathway, Links between Pyk2 and Map Kinases, |
| | | | | Multiple antiapoptotic pathways from IGF-1R |
| | | | | signaling lead to BAD phosphorylation, Nerve |
| | | | | growth factor pathway (NGF), PDGF Signaling |
| | | | | Pathway, PTEN dependent cell cycle arrest and |
| | | | | apoptosis, Role of ERBB2 in Signal Transduction |
| | | | | and Oncology, Signaling of Hepatocyte Growth |
| | | | | Factor Receptor, Sprouty regulation of tyrosine |
| | | | | kinase signals, T Cell Receptor Signaling |
| | | | | Pathway, TPO Signaling Pathway, Transcription |
| | | | | factor CREB and its extracellular signals, Trefoil |
| | | | | Factors Initiate Mucosal Healing, Trka Receptor |
| | | | | Signaling Pathway) |
| 718 | 84090 | AA892861 | similar to RIKEN cDNA 2610528J11 | |
| | | | (predicted) | |
| 719 | 84106 | AA892940 | similar to 116 kDa U5 small nuclear | |
| | | | ribonucleoprotein component (U5 | |
| | | | snRNP-specific protein, 116 kDa) | |
| | | | (U5-116 kDa) | |
| 720 | 84115 | AA892987 | TATA box binding protein (Tbp)- | |
| | | | associated factor, RNA polymerase | |
| | | | I, C (predicted) | |
| 721 | 84118 | AA892997 | | |
| 722 | 84128 | NM_134330 | kidney expressed gene 1 | |
| 723 | 84132 | AA893043 | | |
| 724 | 84153 | AA893172 | | |
| 725 | 84158 | AA893184 | similar to Ac1164 | |
| 726 | 84181 | AA893237 | hypothetical LOC300441 | |
| 727 | 84182 | NM_053493 | 2-hydroxyphytanoyl-Coenzyme A | |
| | | | lyase | |
| 728 | 84183 | NM_012820 | acyl-CoA synthetase long-chain | Fatty acid metabolism |
| | | | family member 1 | |
| 728 | 84184 | NM_012820 | acyl-CoA synthetase long-chain | Fatty acid metabolism |
| | | | family member 1 | |
| 729 | 84185 | AA893244 | 3′-phosphoadenosine 5′- | (Purine metabolism, Selenoamino acid |
| | | | phosphosulfate synthase 2 | metabolism) |
| | | | (predicted) | |
| 730 | 84186 | NM_199386 | ATPase, H+ transporting, lysosomal | (ATP synthesis, Oxidative phosphorylation) |
| | | | 34 kDa, V1 subunit D | |
| 731 | 84192 | NM_001007144 | adipose differentiation-related | |
| | | | protein | |
| 340 | 76217 | NM_172008 | calnexin | |
| 732 | 84216 | AA893493 | | |
| 626 | 84218 | NM_012903 | acidic (leucine-rich) nuclear | Granzyme A mediated Apoptosis Pathway |
| | | | phosphoprotein 32 family, member A | |
| 733 | 84224 | AA893534 | | |
| 734 | 84230 | AA893584 | biogenesis of lysosome-related | |
| | | | organelles complex-1, subunit 2 | |
| | | | (predicted) | |
| 735 | 84232 | AA893592 | reticulocalbin (predicted) | |
| 736 | 84250 | AA893659 | similar to RIKEN cDNA 4933433P14 | |
| | | | gene (predicted) | |
| 737 | 84279 | NM_139104 | EGF-like domain 7 | |
| 738 | 84281 | AA893781 | centaurin, beta 1 (predicted) | |
| 739 | 84287 | NM_134398 | p34 protein | |
| 740 | 84291 | AA893857 | | |
| 741 | 84313 | AA893984 | cytoplasmic FMR1 interacting | Regulation of actin cytoskeleton |
| | | | protein 2 (predicted) | |
| 742 | 84316 | AA894004 | capping protein (actin filament), | |
| | | | gelsolin-like (predicted) | |
| 743 | 84317 | AA894008 | similar to erythrocyte membrane | (CASK Protein Interactions, Enthoprotin |
| | | | protein band 4.1 (elliptocytosis 1, | interactions at the trans-Golgi network, |
| | | | RH-linked) isoform 1 | Membrane-cytoskeleton connections in |
| | | | | erythrocytes, Tight junction) |
| 744 | 84320 | AA894016 | RNA-binding region (RNP1, RRM) | |
| | | | containing 2 (predicted) | |
| 745 | 84322 | PA894027 | | |
| 746 | 84326 | NM_181822 | natural cytotoxicity triggering | |
| | | | receptor 3 | |
| 747 | 84338 | AA894092 | periostin, osteoblast specific factor | |
| | | | (predicted) | |
| 748 | 81056 | NM_001009668 | electron transferring flavoprotein, | |
| | | | alpha polypeptide | |
| 749 | 84360 | AA894200 | myosin, light polypeptide 6, alkali, | Focal adhesion |
| | | | smooth muscle and non-muscle | |
| | | | (predicted) | |
| 750 | 84374 | AA894259 | similar to RIKEN cDNA 2010110M21 | |
| 751 | 84380 | AA894292 | adenylate cyclase 7 | Purine metabolism |
| 328 | 84381 | NM_017033 | phosphoglucomutase 1 | (Galactose metabolism, Glycolysis/ |
| | | | | Gluconeogenesis, Pentose phosphate pathway, |
| | | | | Starch and sucrose metabolism) |
| 752 | 84383 | AA894304 | | |
| 753 | 81059 | NM_032083 | chimerin (chimaerin) 1 | |
| 754 | 84387 | AA894318 | similar to RIKEN cDNA B230312A22 | |
| | | | (predicted) | |
| 755 | 84393 | AA894345 | phosphoprotein enriched in | |
| | | | astrocytes 15 (predicted) | |
| 756 | 81110 | NM_022267 | cyclin D2 | |
| 580 | 77050 | NM_130426 | tumor necrosis factor receptor | (Acetylation and Deacetylation of RelA in The |
| | | | superfamily, member 1b | Nucleus, Chaperones modulate interferon |
| | | | | Signaling Pathway, Cytokine-cytokine receptor |
| | | | | interaction, HIV-I Nef: negative effector of Fas |
| | | | | and TNF, Keratinocyte Differentiation, NF-kB |
| | | | | Signaling Pathway, Regulation of Inducible Nitric |
| | | | | Oxide Synthase by Interleukin-17, Regulation of |
| | | | | Insulin and IGF Signaling by IRS Proteins, |
| | | | | Regulation of transcriptional activity by PML, |
| | | | | SODD/TNFR1 Signaling Pathway, TNFR2 |
| | | | | Signaling Pathway) |
| 757 | 81116 | NM_019147 | jagged 1 | (Notch signaling pathway, Phagocyte superoxide- |
| | | | | generating NADPH oxidase, Phosphoinositides |
| | | | | and their downstream targets.) |
| 758 | 81126 | NM_032067 | ralA binding protein 1 | (Rac 1 cell motility signaling pathway, Ras |
| | | | | Signaling Pathway) |
| 759 | 77051 | AA925300 | mitogen activated protein kinase | (MAPKinase Signaling Pathway, |
| | | | kinase kinase 3 (predicted) | Phosphatidylinositol signaling system) |
| 760 | 81191 | NM_031561 | cd36 antigen | ECM-receptor interaction |
| 761 | 77054 | AA926129 | schlafen 2 (predicted) | |
| 762 | 76254 | NM_012520 | catalase | (Amyotrophic lateral sclerosis (ALS), Methane |
| | | | | metabolism, The IGF-1 Receptor and Longevity, |
| | | | | Tryptophan metabolism) |
| 440 | 81141 | NM_017259 | B-cell translocation gene 2, anti- | |
| | | | proliferative | |
| 763 | 81152 | NM_012681 | transthyretin | |
| 764 | 81154 | AA945171 | apolipoprotein C-IV | |
| 587 | 81155 | NM_134326 | albumin | |
| 381 | 76117 | NM_017158 | cytochrome P450, family 2, | (Fatty acid metabolism, Tryptophan metabolism) |
| | | | subfamily c, polypeptide 7 | |
| 765 | 76346 | AA945704 | DnaJ (Hsp40) homolog, subfamily B, | (Glucocorticoid Receptor-Hsp90 Heterocomplex, |
| | | | member 1 (predicted) | Rhodopsin Processing and Transport) |
| 766 | 81162 | NM_022205 | chemokine (C—X—C motif) receptor 4 | (CXCR4 Signaling Pathway, Cytokine-cytokine |
| | | | | receptor interaction, Ephrins and Ephs: forward |
| | | | | and reverse signalling, HIV-1 defeats host- |
| | | | | mediated resistance by CEM15, Pertussis toxin- |
| | | | | insensitive CCR5 Signaling in Macrophage, |
| | | | | Selective expression of chemokine receptors |
| | | | | during T-cell polarization, The Role of Slit-Robo |
| | | | | Pathway in Axon Guidance, The Role of the |
| | | | | Cxcr4 Chemokine Receptor and pVHL Tumor |
| | | | | Suppressor in Metastasis) |
| 767 | 76312 | AA946040 | | |
| 337 | 81165 | NM_030857 | Yamaguchi sarcoma viral (v-yes-1) | (BCR Signaling Pathway, Calcium signaling |
| | | | oncogene homolog | pathway, Eph Kinase and ephrins support |
| | | | | platelet aggregation, Fc Epsilon Receptor I |
| | | | | Signaling in Mast Cells, Phosphoinositides and |
| | | | | their downstream targets., Platelet thrombus |
| | | | | formation at injury sites, Ub/Proteosome System |
| | | | | in EBV-associated Malignancies) |
| 768 | 81166 | AA946108 | laminin, alpha 3 | (Agrin in Postsynaptic Differentiation, |
| | | | | Hemidesmosome Assembly, Matrix |
| | | | | Metalloproteinase 1 in Cell Signaling, |
| | | | | Neuromuscular Junction Protiens) |
| 769 | 81167 | NM_030829 | G protein-coupled receptor kinase 5 | (Inositol phosphate metabolism, Nicotinate and |
| | | | | nicotinamide metabolism, Phosphatidylinositol |
| | | | | signaling system) |
| 770 | 81172 | AA946439 | | |
| 261 | 81175 | NM_012804 | ATP-binding cassette, sub-family D | |
| | | | (ALD), member 3 | |
| 771 | 81226 | NM_017212 | microtubule-associated protein tau | (Alzheimer's disease, MAPK signaling pathway) |
| 772 | 81227 | NM_054006 | unr protein | |
| 773 | 76318 | NM_012941 | cytochrome P450, subfamily 51 | (Fatty acid metabolism, Tryptophan metabolism) |
| 774 | 81235 | NM_024150 | ADP-ribosylation factor 2 | |
| 775 | 81238 | NM_031534 | Wilms tumor 1 | (Chaperones modulate interferon Signaling |
| | | | | Pathway, Overview of telomerase protein |
| | | | | component gene hTert Transcriptional |
| | | | | Regulation, Regulation of Steroidogenesis by |
| | | | | Orphan NuclearReceptor SF-1) |
| 773 | 76319 | NM_012941 | cytochrome P450, subfamily 51 | (Fatty acid metabolism, Tryptophan metabolism) |
| 471 | 76283 | NM_031970 | heat shock 27 kDa protein 1 | (Downregulated of MTA-3 in ER-negative Breast |
| | | | | Tumors, MAPK signaling pathway, Stress |
| | | | | Induction of HSP Regulation, p38 MAPK |
| | | | | Signaling Pathway) |
| 776 | 76343 | NM_001004082 | heat shock 90 kDa protein 1, beta | |
| 777 | 81262 | AI007824 | | |
| 778 | 81263 | NM_053343 | double cortin and | Phosphatidylinositol signaling system |
| | | | calcium/calmodulin-dependent | |
| | | | protein kinase-like 1 | |
| 776 | 76344 | NM_001004082 | heat shock 90 kDa protein 1, beta | |
| 779 | 76186 | AI009141 | | |
| 780 | 76276 | AI009390 | NADH dehydrogenase (ubiquinone) | (Oxidative phosphorylation, Ubiquinone |
| | | | Fe—S protein 5b, 15 kDa (NADH- | biosynthesis) |
| | | | coenzyme Q reductase) (predicted) | |
| 781 | 81286 | NM_013216 | Ras homolog enriched in brain | |
| 782 | 81292 | NM_057114 | peroxiredoxin 1 | (Methane metabolism, Phenylalanine |
| | | | | metabolism, Prostaglandin and leukotriene |
| | | | | metabolism) |
| 783 | 81295 | NM_022519 | serine (or cysteine) proteinase | Complement and coagulation cascades |
| | | | inhibitor, clade A (alpha-1 | |
| | | | antiproteinase, antitrypsin), member 1 | |
| 784 | 76191 | AI011706 | splicing factor, arginine/serine-rich 3 | |
| | | | (SRp20) (predicted) | |
| 785 | 81309 | NM_017039 | protein phosphatase 2a, catalytic | (AKAP95 role in mitosis and chromosome |
| | | | subunit, alpha isoform | dynamics, AKT Signaling Pathway, Anion |
| | | | | Transport in Heart, Aurora B Kinases in |
| | | | | Regulation of Cell Division, CTCF: First |
| | | | | Multivalent Nuclear Factor, ChREBP regulation |
| | | | | by carbohydrates and cAMP, Constitutive |
| | | | | Androstane Receptor in Regulation of Xenobiotic |
| | | | | Metabolism, Deregulation of CDK5 in Alzheimers |
| | | | | Disease, Erk1/Erk2 Mapk Signaling pathway, |
| | | | | Inactivation of Gsk3 by AKT causes accumulation |
| | | | | of b-catenin in Alveolar Macrophages, Inhibition |
| | | | | of Protein Synthesis by AMP Kinase, |
| | | | | Keratinocyte Differentiation, Protein Kinase A at |
| | | | | the Centrosome, Regulation of ck1/cdk5 by type |
| | | | | 1 glutamate receptors, Skeletal muscle |
| | | | | hypertrophy is regulated via AKT/mTOR pathway, |
| | | | | TGF-beta signaling pathway, Telomeres, |
| | | | | Telomerase, Cellular Aging, and Immortality, |
| | | | | Tight junction, WNT Signaling Pathway, Wnt |
| | | | | signaling pathway, mTOR Signaling Pathway) |
| 300 | 81324 | NM_020075 | eukaryotic translation initiation factor 5 | (Eukaryotic protein translation, Regulation of |
| | | | | eIF2) |
| 786 | 81325 | NM_012521 | calbindin 3, (vitamin D-dependent | |
| | | | calcium binding protein) | |
| 787 | 81326 | NM_138905 | ER transmembrane protein Dri 42 | (Glycerolipid metabolism, Glycerophospholipid |
| | | | | metabolism, Glycosphingolipid metabolism) |
| 788 | 81329 | NM_022713 | transglutaminase 4 (prostate) | |
| 789 | 76170 | NM_024392 | hydroxysteroid (17-beta) | (Androgen and estrogen metabolism, Butanoate |
| | | | dehydrogenase 4 | metabolism, Fatty acid biosynthesis (path 2), |
| | | | | Fatty acid metabolism, Lysine degradation, |
| | | | | Mechanism of Gene Regulation by Peroxisome |
| | | | | Proliferators via PPARa(alpha), Tryptophan |
| | | | | metabolism, Valine, leucine and isoleucine |
| | | | | degradation) |
| 790 | 81318 | AI014135 | | |
| 791 | 81320 | NM_019242 | interferon-related developmental | |
| | | | regulator 1 | |
| 792 | 81333 | NM_012567 | gap junction membrane channel | |
| | | | protein alpha 1 | |
| 793 | 81334 | NM_053868 | neuroligin 1 | |
| 486 | 81337 | NM_022869 | nucleolar and coiled-body | |
| | | | phosphoprotein 1 | |
| 794 | 81342 | NM_172029 | eukaryotic translation initiation factor | VEGF, Hypoxia, and Angiogenesis |
| | | | 2B, subunit 1 alpha | |
| 233 | 81357 | NM_017126 | ferredoxin 1 | |
| 795 | 81359 | NM_017215 | solute carrier family 1 (glial high | Amyotrophic lateral sclerosis (ALS) |
| | | | affinity glutamate transporter), | |
| | | | member 2 | |
| 796 | 81361 | NM_153735 | neuronal pentraxin 1 | |
| 797 | 81362 | NM_133423 | splicing factor YT521-B | |
| 798 | 81366 | NM_019241 | gap junction membrane channel | |
| | | | protein beta 5 | |
| 799 | 81392 | NM_017030 | propionyl coenzyme A carboxylase, | (Propanoate metabolism, Valine, leucine and |
| | | | beta polypeptide | isoleucine degradation) |
| 360 | 76093 | NM_024127 | growth arrest and DNA-damage- | (ATM Signaling Pathway, Cell Cycle: G2/M |
| | | | inducible 45 alpha | Checkpoint, Cell cycle, Hypoxia and p53 in the |
| | | | | Cardiovascular system, MAPK signaling pathway, |
| | | | | p53 Signaling Pathway) |
| 360 | 76094 | NM_024127 | growth arrest and DNA-damage- | (ATM Signaling Pathway, Cell Cycle: G2/M |
| | | | inducible 45 alpha | Checkpoint, Cell cycle, Hypoxia and p53 in the |
| | | | | Cardiovascular system, MAPK signaling pathway, |
| | | | | p53 Signaling Pathway) |
| 772 | 81395 | NM_054006 | unr protein | |
| 800 | 81396 | NM_012817 | insulin-like growth factor binding | |
| | | | protein 5 | |
| 801 | 81398 | NM_017313 | RAB3A interacting protein | |
| 626 | 81401 | NM_012903 | acidic (leucine-rich) nuclear | Granzyme A mediated Apoptosis Pathway |
| | | | phosphoprotein 32 family, member A | |
| 802 | 81403 | NM_012774 | glypican 3 | |
| 803 | 81405 | NM_031135 | TGFB inducible early growth | |
| | | | response | |
| 804 | 81412 | AI071866 | | |
| 805 | 81426 | NM_019246 | proprotein convertase subtilisin/kexin | |
| | | | type 7 | |
| 806 | 81471 | AI101320 | jagged 2 | Notch signaling pathway |
| 807 | 81494 | AI102044 | | |
| 808 | 81498 | NM_024000 | vesicle-associated calmodulin- | |
| | | | binding protein | |
| 809 | 81513 | NM_053311 | ATPase, Ca++ transporting, plasma | Calcium signaling pathway |
| | | | membrane 1 | |
| 810 | 81517 | NM_001008888 | ubiquinol-cytochrome c reductase, | Oxidative phosphorylation |
| | | | Rieske iron-sulfur polypeptide 1 | |
| 811 | 81518 | NM_013087 | CD 81 antigen | |
| 812 | 76313 | AI104035 | | |
| 813 | 76204 | AI104077 | | |
| 814 | 81527 | NM_022922 | triosephosphate isomerase 1 | (Fructose and mannose metabolism, Glycolysis/ |
| | | | | Gluconeogenesis, Glycolysis Pathway, Inositol |
| | | | | metabolism) |
| 815 | 81529 | NM_145783 | cytochrome c oxidase, subunit Va | Oxidative phosphorylation |
| 47 | 81530 | NM_031330 | heterogeneous nuclear | |
| | | | ribonucleoprotein A/B | |
| 816 | 81536 | NM_017260 | arachidonate 5-lipoxygenase | |
| | | | activating protein | |
| 817 | 81539 | NM_017147 | cofilin 1 | Regulation of actin cytoskeleton |
| 818 | 81429 | NM_013113 | ATPase, Na+/K+ transporting, beta 1 | |
| | | | polypeptide | |
| 819 | 81436 | NM_172034 | farnesyltransferase, CAAX box, beta | |
| 820 | 76228 | AI136977 | FK506 binding protein 4 | Caveolin-Assisted Cholesterol Transport |
| 821 | 81447 | NM_013060 | Inhibitor of DNA binding 2, dominant | TGF-beta signaling pathway |
| | | | negative helix-loop-helix protein | |
| 266 | 76108 | NM_031576 | P450 (cytochrome) oxidoreductase | |
| 822 | 81451 | NM_012796 | glutathione S-transferase, theta 2 | Glutathione metabolism |
| 823 | 81459 | NM_053874 | CAP, adenylate cyclase-associated | |
| | | | protein, 2 (yeast) | |
| 824 | 81465 | NM_012716 | solute carrier family 16 | |
| | | | (monocarboxylic acid transporters), | |
| | | | member 1 | |
| 193 | 81481 | NM_031719 | chloride channel, nucleotide- | |
| | | | sensitive, 1A | |
| 825 | 76347 | AI169265 | | |
| 826 | 81483 | NM_053819 | tissue inhibitor of metalloproteinase 1 | Inhibition of Matrix Metalloproteinases 1 |
| 826 | 81484 | NM_053819 | tissue inhibitor of metalloproteinase 1 | Inhibition of Matrix Metalloproteinases |
| 827 | 81544 | NM_053365 | fatty acid binding protein 4, | |
| | | | adipocyte | |
| 828 | 81548 | AI169756 | | |
| 829 | 76133 | AI170379 | | |
| 830 | 81557 | NM_053591 | dipeptidase 1 (renal) | |
| 831 | 81559 | NM_031616 | zinc finger protein 265 | |
| 832 | 76288 | NM_032079 | DnaJ (Hsp40) homolog, subfamily A, | (Dystrobrevin Complex, Proteins in |
| | | | member 2 | Neuromuscular Disease, Stimulation of Synaptic |
| | | | | Vesicle Recycling by Nitrous Oxide) |
| 832 | 76289 | NM_032079 | DnaJ (Hsp40) homolog, subfamily A, | (Dystrobrevin Complex, Proteins in |
| | | | member 2 | Neuromuscular Disease, Stimulation of Synaptic |
| | | | | Vesicle Recycling by Nitrous Oxide) |
| 833 | 81563 | NM_053994 | pyruvate dehydrogenase E1 alpha 2 | (Butanoate metabolism, Glycolysis/ |
| | | | | Gluconeogenesis, Pyruvate metabolism) |
| 834 | 81565 | NM_012600 | malic enzyme 1 | (Mechanism of Gene Regulation by Peroxisome |
| | | | | Proliferators via PPARa(alpha), Pyruvate |
| | | | | metabolism, Shuttle for transfer of acetyl groups |
| | | | | from mitochondria to the cytosol) |
| 835 | 81577 | NM_139099 | ATP synthase, H+ transporting, | (ATP synthesis, Oxidative phosphorylation) |
| | | | mitochondrial F1 complex, epsilon | |
| | | | subunit | |
| 836 | 81584 | NM_019904 | lectin, galactose binding, soluble 1 | |
| 837 | 76357 | AI172452 | cytochrome c oxidase subunit VIIa | Oxidative phosphorylation |
| | | | polypeptide 2 like (predicted) | |
| 838 | 81595 | AI175486 | hypothetical LOC298661 | |
| 839 | 81606 | NM_173101 | myosin IE | |
| 840 | 81611 | NM_031137 | tripeptidyl peptidase II | |
| 841 | 81613 | AI176460 | | |
| 842 | 81614 | NM_017211 | golgi apparatus protein 1 | |
| 843 | 81620 | NM_013156 | cathepsin L | |
| 471 | 76285 | NM_031970 | heat shock 27 kDa protein 1 | (Downregulated of MTA-3 in ER-negative Breast |
| | | | | Tumors, MAPK signaling pathway, Stress |
| | | | | Induction of HSP Regulation, p38 MAPK |
| | | | | Signaling Pathway) |
| 844 | 81624 | NM_031628 | nuclear receptor subfamily 4, group | |
| | | | A, member 3 | |
| 845 | 76293 | AI176726 | | |
| 846 | 81629 | AI177052 | nucleoporin 153 kD | |
| 847 | 81632 | NM_031789 | nuclear factor, erythroid derived 2, | (Oxidative Stress Induced Gene Expression Via |
| | | | like 2 | Nrf2, Prion Pathway, Prion disease) |
| 847 | 81633 | NM_031789 | nuclear factor, erythroid derived 2, | (Oxidative Stress Induced Gene Expression Via |
| | | | like 2 | Nrf2, Prion Pathway, Prion disease) |
| 848 | 81637 | NM_053985 | H3 histone, family 3B | |
| 300 | 81643 | NM_020075 | eukaryotic translation initiation factor 5 | (Eukaryotic protein translation, Regulation of |
| | | | | eIF2) |
| 840 | 81644 | NM_031137 | tripeptidyl peptidase II | |
| 849 | 81654 | NM_031144 | actin, beta | (Adherens junction, Focal adhesion, Regulation |
| | | | | of actin cytoskeleton, SWI/SNF Activator |
| | | | | Complex, Tight junction). |
| 850 | 81660 | NM_012580 | heme oxygenase (decycling) 1 | (IL-10 Anti-inflammatory Signaling Pathway, |
| | | | | Porphyrin and chlorophyll metabolism) |
| 851 | 81663 | NM_033351 | Fc receptor, IgG, alpha chain | |
| | | | transporter | |
| 852 | 81668 | NM_020079 | prolactin-like protein C 1 | |
| 853 | 81671 | NM_013011 | tyrosine 3- | |
| | | | monooxygenase/tryptophan 5- | |
| | | | monooxygenase activation protein, | |
| | | | zeta polypeptide | |
| 854 | 81672 | NM_031840 | farensyl diphosphate synthase | Biosynthesis of steroids |
| 855 | 81678 | NM_013106 | guanine nucleotide binding protein, | Tight junction |
| | | | alpha inhibiting 3 | |
| 165 | 76114 | NM_138877 | diaphorase 1 | Aminosugars metabolism |
| 856 | 81696 | NM_031739 | potassium voltage gated channel, | |
| | | | Shal-related family, member 3 | |
| 857 | 81700 | NM_022538 | phosphatidic acid phosphatase 2a | (Glycerolipid metabolism, Glycerophospholipid |
| | | | | metabolism, Glycosphingolipid metabolism) |
| 858 | 81705 | NM_012999 | Subtilisin-like endoprotease | |
| 859 | 81706 | NM_053867 | tumor protein, translationally- | |
| | | | controlled 1 | |
| 860 | 81722 | AI231445 | | |
| 861 | 81726 | NM_022500 | ferritin light chain 1 | |
| 862 | 81729 | NM_021587 | latent transforming growth factor | |
| | | | beta binding protein 1 | |
| 863 | 81731 | NM_031672 | solute carrier family 15 (H+/peptide | |
| | | | transporter), member 2 | |
| 864 | 81732 | NM_032084 | chimerin (chimaerin) 2 | |
| 865 | 81733 | NM_030586 | cytochrome b5, outer mitochondrial | |
| | | | membrane isoform | |
| 866 | 81734 | AI232268 | low density lipoprotein receptor- | |
| | | | related protein associated protein 1 | |
| 867 | 81755 | AI234351 | similar to immunoglobulin light chain | |
| | | | variable region | |
| 868 | 81759 | AI234915 | WD repeat domain 5B (predicted) | |
| 869 | 81778 | NM_198132 | heterogeneous nuclear | |
| | | | ribonucleoprotein A3 | |
| 870 | 76224 | NM_001011901 | heat shock protein 105 (predicted) | |
| 410 | 81781 | NM_012978 | luteinizing | (Calcium signaling pathway, Neuroactive ligand- |
| | | | hormone/choriogonadotropin | receptor interaction) |
| | | | receptor | |
| 871 | 81784 | AI237535 | LPS-induced TNF-alpha factor | |
| 872 | 81786 | AI237592 | progestin induced protein | |
| 313 | 81788 | NM_012598 | lipoprotein lipase | (Alzheimer's disease, C-Reactive Protein, Apo-B |
| | | | | in Lipid Metabolism and Cardiovascular Disease, |
| | | | | Glycerolipid metabolism, Low-density lipoprotein |
| | | | | (LDL) pathway during atherogenesis, Mechanism |
| | | | | of Gene Regulation by Peroxisome Proliferators |
| | | | | via PPARa(alpha), Role of PPAR-gamma |
| | | | | Coactivators in Obesity and Thermogenesis, |
| | | | | Roles of Nuclear Receptors in the Regulation of |
| | | | | Bile Acid Metabolism and Cholesterol |
| | | | | Homeostasis, Visceral Fat Deposits and the |
| | | | | Metabolic Syndrome) |
| 873 | 81789 | NM_012533 | carboxypeptidase B1 | |
| 874 | 80438 | AI638939 | bobby sox homolog (Drosophila) | |
| | | | (predicted) | |
| 875 | 80439 | AI638940 | | |
| 876 | 80450 | AI638951 | | |
| 877 | 80451 | AI638952 | | |
| 878 | 80465 | NM_133605 | calcium/calmodulin-dependent | (Bioactive Peptide Induced Signaling Pathway, |
| | | | protein kinase II gamma | CD44-Mediated Signaling, Ca++/Calmodulin- |
| | | | | dependent Protein Kinase Activation, Calcium |
| | | | | signaling pathway, Meiotic Arrest in Oogenesis, |
| | | | | Regulation of PGC-1a, Stathmin and breast |
| | | | | cancer resistance to antimicrotubule agents, |
| | | | | Transcription factor CREB and its extracellular |
| | | | | signals, Wnt signaling pathway) |
| 879 | 80489 | AI638996 | | |
| 880 | 80497 | AI639007 | | |
| 881 | 80523 | AI639035 | | |
| 882 | 80545 | AI639058 | transmembrane, prostate androgen | |
| | | | induced RNA (predicted) | |
| 883 | 80546 | AI639060 | | |
| 884 | 80551 | AI639065 | | |
| 885 | 80556 | AI639071 | | |
| 886 | 80589 | AI639107 | ADP-ribosylation factor-like 11 | |
| | | | (predicted) | |
| 887 | 80596 | NM_198743 | BWK-1 | |
| 888 | 80610 | AI639132 | similar to RIKEN cDNA 6720467C03 | |
| | | | (predicted) | |
| 889 | 80629 | AI639152 | similar to Alpha-1-antitrypsin-related | |
| | | | protein precursor (predicted) | |
| 890 | 80651 | AI639175 | | |
| 891 | 80655 | AI639179 | | |
| 892 | 80656 | AI639181 | | |
| 893 | 80664 | AI639189 | similar to nuclear protein with a | |
| | | | coiled coil-4 domain of bilaterial | |
| | | | origin like (3L720) | |
| 894 | 80665 | AI639190 | | |
| 895 | 80667 | AI639192 | | |
| 896 | 80684 | AI639209 | | |
| 897 | 80685 | AI639210 | doublesex and mab-3 related | |
| | | | transcription factor like family A1 | |
| | | | (predicted) | |
| 898 | 80686 | NM_017298 | calcium channel, voltage-dependent, | Calcium signaling pathway |
| | | | L type, alpha 1D subunit | |
| 89 | 80689 | NM_131913 | X-prolyl aminopeptidase | |
| | | | (aminopeptidase P) 1, soluble | |
| 899 | 80691 | AI639217 | | |
| 900 | 80692 | NM_001009268 | ARP2 actin-related protein 2 | (How Progesterone Initiates the Oocyte |
| | | | homolog (yeast) (predicted) | Maturation, How does salmonella hijack a cell, |
| | | | | Listeria-Induced Signal Transduction, Rho cell |
| | | | | motility signaling pathway, Role of PI3K subunit |
| | | | | p85 in regulation of Actin Organization and Cell |
| | | | | Migration, Role of syndapins in vesicle trafficking, |
| | | | | Y branching of actin filaments) |
| 901 | 80715 | AI639246 | extra cellular link domain-containing | |
| | | | 1 (predicted) | |
| 902 | 80723 | AI639252 | | |
| 903 | 80728 | NM_181376 | spermatogenesis associated, serine- | |
| | | | rich 1 | |
| 904 | 80733 | AI639263 | | |
| 905 | 80734 | AI639264 | | |
| 906 | 80755 | AI639293 | | |
| 907 | 80788 | AI639324 | F-box protein 38 (predicted) | |
| 908 | 80792 | AI639328 | | |
| 909 | 80793 | AI639329 | WD repeat domain 37 (predicted) | |
| 910 | 80805 | AI639343 | | |
| 911 | 80831 | NM_001007725 | intercellular adhesion molecule 2 | |
| 912 | 80857 | AI639400 | | |
| 913 | 80861 | AI639404 | | |
| 914 | 80862 | NM_138831 | solute carrier family 16 | |
| | | | (monocarboxylic acid transporters), | |
| | | | member 10 | |
| 915 | 80868 | NM_207614 | P55 | |
| 916 | 80870 | AI639412 | similar to asporin precursor | |
| 917 | 80888 | AI639432 | | |
| 918 | 80897 | NM_133609 | eukaryotic translation initiation factor | VEGF, Hypoxia, and Angiogenesis |
| | | | 2B, subunit 3 gamma | |
| 919 | 80901 | NM_057191 | kelch repeat and BTB (POZ) domain | |
| | | | containing 10 | |
| 920 | 80920 | AI639461 | | |
| 921 | 80927 | AI639467 | synaptotagmin 1 | |
| 922 | 80937 | AI639476 | squamous cell carcinoma antigen | |
| | | | recognized by T-cells 3 (predicted) | |
| 923 | 80954 | AI639495 | | |
| 924 | 80957 | AI639498 | | |
| 925 | 80964 | AI639505 | | |
| 926 | 80975 | AI639518 | polymerase (RNA) II (DNA directed) | (Purine metabolism, Pyrimidine metabolism, RNA |
| | | | polypeptide H (predicted) | polymerase) |
| 927 | 80998 | AI639536 | | |
| 928 | 83529 | NM_053472 | cytochrome c oxidase subunit IV | Oxidative phosphorylation |
| | | | isoform 2 | |
| 929 | 83544 | H31535 | similar to RIKEN cDNA 2610511E22 | |
| | | | (predicted) | |
| 930 | 83545 | H31550 | | |
| 931 | 83546 | H31554 | | |
| 932 | 83549 | NM_153294 | prepro-Neuropeptide W polypeptide | Neuroactive ligand-receptor interaction |
| 643 | 83555 | NM_080902 | hypoxia induced gene 1 | |
| 933 | 83556 | NM_021597 | GERp95 | Dicer Pathway |
| 934 | 83572 | H31887 | similar to RIKEN cDNA 1700037H04 | |
| | | | (predicted) | |
| 935 | 83573 | H31897 | | |
| 936 | 83578 | H31964 | | |
| 937 | 83581 | H31990 | | |
| 938 | 83587 | H33084 | | |
| 939 | 83593 | H33149 | similar to RIKEN cDNA 1810047C23 | |
| | | | (predicted) | |
| 940 | 83611 | H33528 | | |
| 941 | 83614 | H33566 | | |
| 942 | 83615 | H33577 | | |
| 943 | 83621 | H33660 | similar to chromosome 14 open | |
| | | | reading frame 50 (predicted) | |
| 944 | 78424 | NM_024372 | solute carrier family 6 | |
| | | | (neurotransmitter transporter, | |
| | | | GABA), member 11 | |
| 945 | 78426 | NM_013143 | meprin 1 alpha | |
| 946 | 78428 | NM_138549 | glycoprotein, synaptic 2 | |
| 947 | 78435 | S46798 | | |
| 948 | 78445 | NM_031034 | guanine nucleotide binding protein, | (MAPK signaling pathway, PKC-catalyzed |
| | | | alpha 12 | phosphorylation of inhibitory phosphoprotein of |
| | | | | myosin phosphatase, Regulation of actin |
| | | | | cytoskeleton, Rho-Selective Guanine Exchange |
| | | | | Factor AKAP13 Mediates Stress Fiber Formation, |
| | | | | Thrombin signaling and protease-activated |
| | | | | receptors) |
| 949 | 78452 | S53987 | | |
| 950 | 78457 | NM_017037 | peripheral myelin protein 22 | |
| 951 | 78460 | S56464 | | |
| 951 | 78461 | S56464 | | |
| 220 | 78466 | NM_057105 | UDP glycosyltransferase 1 family, | (Androgen and estrogen metabolism, Pentose |
| | | | polypeptide A6 | and glucuronate interconversions, Porphyrin and |
| | | | | chlorophyll metabolism, Starch and sucrose |
| | | | | metabolism) |
| 952 | 78470 | S58528 | | |
| 953 | 78478 | NM_012642 | renin 1 | Angiotensin-converting enzyme 2 regulates heart |
| | | | | function |
| 954 | 78481 | NM_012649 | syndecan 4 | ECM-receptor interaction |
| 954 | 78482 | NM_012649 | syndecan 4 | ECM-receptor interaction |
| 955 | 78485 | S61960 | cysteine conjugate-beta lyase | Tryptophan metabolism |
| | | | (predicted) | |
| 956 | 78486 | NM_153308 | glutamate receptor, ionotropic, N- | |
| | | | methyl D-asparate-associated | |
| | | | protein 1 (glutamate binding) | |
| 957 | 78489 | NM_031654 | Rab geranylgeranyl transferase, a | |
| | | | subunit | |
| 958 | 78495 | NM_053290 | phosphoglycerate mutase 1 | Glycolysis/Gluconeogenesis |
| 959 | 78505 | S65091 | protein phosphatase 1, regulatory | |
| | | | subunit 1C | |
| 960 | 78509 | NM_017305 | glutamate cysteine ligase, modifier | (Glutamate metabolism, Glutathione metabolism) |
| | | | subunit | |
| 960 | 78510 | NM_017305 | glutamate cysteine ligase, modifier | (Glutamate metabolism, Glutathione metabolism) |
| | | | subunit | |
| 961 | 78511 | NM_017334 | cAMP responsive element modulator | |
| 961 | 78512 | NM_017334 | cAMP responsive element modulator | |
| 962 | 78513 | NM_017061 | lysyl oxidase | |
| 963 | 78516 | NM_022852 | pancreatic and duodenal homeobox | |
| | | | gene 1 | |
| 964 | 78521 | NM_080477 | 6-phosphofructo-2-kinase/fructose- | Fructose and mannose metabolism |
| | | | 2,6-biphosphatase 2 | |
| 965 | 78529 | NM_001007636 | S100 calcium binding protein A1 | |
| 966 | 78532 | NM_013047 | thyrotropin releasing hormone | (Calcium signaling pathway, Neuroactive ligand- |
| | | | receptor | receptor interaction) |
| 967 | 78555 | NM_031509 | glutathione S-transferase A5 | Glutathione metabolism |
| 968 | 78557 | NM_021989 | tissue inhibitor of metalloproteinase 2 | Inhibition of Matrix Metalloproteinases |
| 969 | 78563 | NM_031051 | macrophage migration inhibitory | (Phenylalanine metabolism, Tyrosine |
| | | | factor | metabolism) |
| 970 | 78569 | S74257 | | |
| 971 | 78572 | NM_013001 | paired box gene 6 | |
| 972 | 78574 | NM_033096 | protein phosphatase 1B, magnesium | MAPK signaling pathway |
| | | | dependent, beta isoform | |
| 973 | 78595 | NM_199230 | activin A receptor, type 1B | (Adherens junction, Cytokine-cytokine receptor |
| | | | | interaction, MAPK signaling pathway, |
| | | | | Phosphatidylinositol signaling system, TGF-beta |
| | | | | signaling pathway) |
| 962 | 78601 | NM_017061 | lysyl oxidase | |
| 974 | 78602 | NM_024125 | CCAAT/enhancer binding protein | IL 6 signaling pathway |
| | | | (C/EBP), beta | |
| 975 | 78603 | S77532 | | |
| 976 | 78604 | NM_013137 | discoidin domain receptor family, | |
| | | | member 1 | |
| 977 | 78606 | S77858 | | |
| 978 | 78616 | S78556 | | |
| 979 | 78623 | S79304 | | |
| 980 | 78629 | NM_013007 | prepronociceptin | |
| 981 | 78634 | S79820 | | |
| 982 | 78638 | S80118 | | |
| 983 | 78639 | NM_017044 | parathyroid hormone | Neuroactive ligand-receptor interaction |
| 984 | 78642 | S80379 | | |
| 985 | 78644 | NM_012613 | natriuretic peptide receptor 1 | Purine metabolism |
| 986 | 78653 | NM_012732 | lipase A, lysosomal acid | (Bile acid biosynthesis, Glycerolipid metabolism) |
| 559 | 78660 | NM_173111 | tropomyosin isoform 6 | |
| 987 | 78670 | S83320 | | |
| 988 | 76872 | NM_181371 | glutathione S-transferase, | Glutathione metabolism |
| | | | mitochondrial | |
| 989 | 78672 | S85184 | | |
| 989 | 78673 | S85184 | | |
| 990 | 78679 | S94371 | | |
| 991 | 79818 | NM_031588 | neuregulin 1 | (Agrin in Postsynaptic Differentiation, Neuregulin |
| | | | | Receptor Signaling, Neuroregulin receptor |
| | | | | degradation protein-1 Controls ErbB3 receptor |
| | | | | recycling) |
| 992 | 82149 | NM_022588 | metastasis associated 1 | Downregulated of MTA-3 in ER-negative Breast |
| | | | | Tumors |
| 993 | 79758 | NM_013033 | solute carrier family 5 | |
| | | | (sodium/glucose cotransporter), | |
| | | | member 1 | |
| 994 | 79594 | NM_053573 | olfactomedin 1 | |
| 995 | 78694 | NM_017174 | phospholipase A2, group V | (Glycerophospholipid metabolism, MAPK |
| | | | | signaling pathway, Prostaglandin and leukotriene |
| | | | | metabolism) |
| 996 | 79773 | NM_013086 | cAMP responsive element modulator | |
| 997 | 79725 | NM_013080 | protein tyrosine phosphatase, | |
| | | | receptor-type, Z polypeptide 1 | |
| 998 | 76888 | NM_053857 | eukaryotic translation initiation factor | (Inhibition of Protein Synthesis by AMP Kinase, |
| | | | 4E binding protein-1 | Regulation of eIF4e and p70 S6 Kinase, Skeletal |
| | | | | muscle hypertrophy is regulated via AKT/mTOR |
| | | | | pathway, mTOR Signaling Pathway) |
| 999 | 82060 | NM_020071 | fibrinogen, B beta polypeptide | (Acute Myocardial Infarction, C-Reactive Protein, |
| | | | | Apo-B in Lipid Metabolism and Cardiovascular |
| | | | | Disease, Complement and coagulation cascades, |
| | | | | Extrinsic Prothrombin Activation Pathway, |
| | | | | Fibrinolysis Pathway, Intrinsic Prothrombin |
| | | | | Activation Pathway, Platelet thrombus formation |
| | | | | at injury sites, Role of Peroxisome Proliferator- |
| | | | | Activated Receptor in Inflammation) |
| 1000 | 76715 | NM_017169 | peroxiredoxin 2 | (Methane metabolism, Phenylalanine |
| | | | | metabolism, Prostaglandin and leukotriene |
| | | | | metabolism) |
| 1001 | 78701 | U06752 | mucin 4 | |
| 1002 | 82002 | NM_019276 | UDP-glucuronosyltransferase 8 | |
| 842 | 82500 | NM_017211 | golgi apparatus protein 1 | |
| 1003 | 79624 | NM_024379 | glutamate receptor, ionotropic, delta 2 | Neuroactive ligand-receptor interaction |
| 1004 | 82439 | NM_053369 | transcription factor 4 | |
| 1005 | 79921 | U09229 | cut-like 1 (Drosophila) | |
| 1006 | 78709 | U09401 | tenascin C | |
| 1007 | 82163 | NM_017100 | polo-like kinase 1 (Drosophila) | (Cell Cycle: G2/M Checkpoint, Cell cycle, |
| | | | | Phosphatidylinositol signaling system, |
| | | | | Ubiquitylation in the Control of Cell Cycle) |
| 1008 | 79623 | NM_019329 | contactin 3 | |
| 324 | 80281 | NM_017010 | glutamate receptor, ionotropic, N- | (Calcium signaling pathway, Erythropoietin |
| | | | methyl D-aspartate 1 | mediated neuroprotection through NF-kB, |
| | | | | Ethanol-Induced Signal Transduction, LIN |
| | | | | Transport Complex, Neuregulin Receptor |
| | | | | Signaling, Neuroactive ligand-receptor |
| | | | | interaction, Nitric Oxide Signaling Pathway, |
| | | | | Stimulation of Synaptic Vesicle Recycling by |
| | | | | Nitrous Oxide, Synaptic Proteins at the Synaptic |
| | | | | Junction) |
| 1009 | 82032 | NM_053864 | valosin-containing protein | |
| 1010 | 79754 | NM_030831 | G-protein coupled receptor 12 | |
| 1011 | 79888 | NM_012982 | msh homeo box homolog 2 | |
| | | | (Drosophila) | |
| 141 | 78719 | NM_031514 | Janus kinase 2 | (Bioactive Peptide Induced Signaling Pathway, |
| | | | | Chaperones modulate interferon Signaling |
| | | | | Pathway, EPO Signaling Pathway, Erythropoietin |
| | | | | mediated neuroprotection through NF-kB, |
| | | | | Evasion of Innate Immunity by Protozoan |
| | | | | Parasites, Growth Hormone Signaling Pathway, |
| | | | | ICAM-1 in signal transduction, IFN gamma |
| | | | | signaling pathway, IL 3 signaling pathway, IL 6 |
| | | | | signaling pathway, IL12 and Stat4 Dependent |
| | | | | Signaling Pathway in Th1 Development, IL22 |
| | | | | Soluble Receptor Signaling Pathway, Inhibition of |
| | | | | Cellular Proliferation by Gleevec, Jak-STAT |
| | | | | signaling pathway, NO2-dependent IL 12 |
| | | | | Pathway in NK cells, Regulation of Inducible |
| | | | | Nitric Oxide Synthase by Interleukin-17, |
| | | | | Regulation of Insulin and IGF Signaling by IRS |
| | | | | Proteins, Stat3 Signaling Pathway, TPO Signaling |
| | | | | Pathway) |
| 1012 | 82031 | NM_012825 | aquaporin 4 | |
| 1013 | 82176 | NM_052801 | von Hippel-Lindau syndrome | (Cullin-based ligases: von Hippel-Lindau |
| | | | homolog | Complex, Hypoxia-Inducible Factor in the |
| | | | | Cardiovascular System, The Role of the Cxcr4 |
| | | | | Chemokine Receptor and pVHL Tumor |
| | | | | Suppressor in Metastasis, VEGF, Hypoxia, and |
| | | | | Angiogenesis) |
| 795 | 82215 | NM_017215 | solute carrier family 1 (glial high | Amytotrophic lateral sclerosis (ALS) |
| | | | affinity glutamate transporter), | |
| | | | member 2 | |
| 1014 | 79659 | NM_022856 | Ngfi-A binding protein 1 | |
| 1015 | 76900 | NM_053865 | N-acetyltransferase 1 (arylamine N- | |
| | | | acetyltransferase) | |
| 1016 | 82662 | NM_053865 | reticulon 1 | |
| 773 | 76902 | NM_012941 | cytochrome P450, subfamily 51 | (Fatty acid metabolism, Tryptophan metabolism) |
| 1017 | 82094 | NM_133580 | RAB26, member RAS oncogene | |
| | | | family | |
| 1018 | 76903 | NM_012954 | fos-like antigen 2 | |
| 1019 | 82090 | NM_145092 | lamina-associated polypeptide 1B | |
| 1020 | 78731 | NM_053325 | synaptotagmin 8 | |
| 1021 | 79688 | NM_022863 | iron responsive element binding | |
| | | | protein 2 | |
| 1022 | 79684 | NM_031126 | syntaxin binding protein 2 | |
| 1023 | 76904 | NM_012495 | aldolase A | (Downregulated of MTA-3 in ER-negative Breast |
| | | | | Tumors, Fructose and mannose metabolism, |
| | | | | Glycolysis/Gluconeogenesis, Inositol |
| | | | | metabolism, Pentose phosphate pathway) |
| 1024 | 82039 | NM_147210 | nuclear receptor subfamily 1, group | |
| | | | D, member 2 | |
| 1025 | 78735 | U21719 | DEAD (Asp-Glu-Ala-Asp) box | |
| | | | polypeptide 21b (predicted) | |
| 1026 | 79694 | NM_013025 | chemokine (C-C motif) ligand 3 | (Cytokine-cytokine receptor interaction, |
| | | | | Erythrocyte Differentiation Pathway, Selective |
| | | | | expression of chemokine receptors during T-cell |
| | | | | polarization) |
| 1027 | 78739 | NM_057103 | A kinase (PRKA) anchor protein | |
| | | | (gravin) 12 | |
| 1028 | 82134 | NM_017244 | cellular retinoic acid binding protein 2 | |
| 1029 | 76905 | NM_022199 | dual specificity phosphatase 4 | MAPK signaling pathway |
| 1030 | 82207 | NM_017365 | PDZ and LIM domain 1 (elfin) | |
| 1031 | 79787 | NM_017064 | signal transducer and activator of | (Bioactive Peptide Induced Signaling Pathway, |
| | | | transcription 5A | EGF Signaling Pathway, EPO Signaling Pathway, |
| | | | | Growth Hormone Signaling Pathway, IL 2 |
| | | | | signaling pathway, IL 3 signaling pathway, IL-10 |
| | | | | Anti-inflammatory Signaling Pathway, IL-2 |
| | | | | Receptor Beta Chain in T cell Activation, IL-7 |
| | | | | Signal Transduction, IL22 Soluble Receptor |
| | | | | Signaling Pathway, Inhibition of Cellular |
| | | | | Proliferation by Gleevec, Jak-STAT signaling |
| | | | | pathway, Mechanism of Gene Regulation by |
| | | | | Peroxisome Proliferators via PPARa(alpha), |
| | | | | PDGF Signaling Pathway, TPO Signaling |
| | | | | Pathway) |
| 1032 | 78740 | U25148 | myosin IA | |
| 1033 | 76906 | NM_012610 | nerve growth factor receptor (TNFR | (Erk1/Erk2 Mapk Signaling pathway, Nerve |
| | | | superfamily, member 16) | growth factor pathway (NGF), Nogo-A Signal |
| | | | | Transduction Pathway and Axon Regeneration, |
| | | | | Phosphorylation of MEK1 by cdk5/p35 down |
| | | | | regulates the MAP kinase pathway) |
| 1034 | 82148 | NM_031987 | carnitine O-octanoyltransferase | (Butanoate metabolism, Glycerophospholipid |
| | | | | metabolism, Histidine metabolism, Lysine |
| | | | | degradation, Phenylalanine metabolism, Tyrosine |
| | | | | metabolism, Valine, leucine and isoleucine |
| | | | | degradation) |
| 1035 | 82480 | NM_031002 | inositol polyphosphate-4- | (Inositol phosphate metabolism, |
| | | | phosphatase, type 1 | Phosphatidylinositol signaling system) |
| 1036 | 82848 | NM_031615 | zinc finger protein 148 | |
| 1037 | 82167 | NM_138849 | B/K protein | |
| 1038 | 78749 | NM_147211 | SH3 domain binding protein CR16 | |
| 1039 | 82136 | NM_017228 | dentatorubral pallidoluysian atrophy | Dentatorubropallidoluysian atrophy (DRPLA) |
| 1040 | 78759 | NM_133513 | mucin 10, submandibular gland | |
| | | | salivary mucin | |
| 1041 | 79726 | NM_017253 | branched chain aminotransferase 1, | (Pantothenate and CoA biosynthesis, Valine, |
| | | | cytosolic | leucine and isoleucine degradation) |
| 1042 | 82130 | NM_031552 | adducin 3 (gamma) | |
| 1043 | 78762 | NM_031077 | PCTAIRE-motif protein kinase 1 | Phosphatidylinositol signaling system |
| 1044 | 78765 | NM_017274 | glycerol-3-phosphate | (Glycerolipid metabolism, Glycerophospholipid |
| | | | acyltransferase, mitochondrial | metabolism) |
| 1044 | 78767 | NM_017274 | glycerol-3-phosphate | (Glycerolipid metabolism, Glycerophospholipid |
| | | | acyltransferase, mitochondrial | metabolism) |
| 918 | 80018 | NM_133609 | eukaryotic translation initiation factor | VEGF, Hypoxia, and Angiogenesis |
| | | | 2B, subunit 3 gamma | |
| 1045 | 76691 | NM_133551 | phospholipase A2, group IVA | (Aspirin Blocks Signaling Pathway Involved in |
| | | | (cytosolic, calcium-dependent) | Platelet Activation, Eicosanoid Metabolism, Fc |
| | | | | Epsilon Receptor I Signaling in Mast Cells, |
| | | | | Glycerophospholipid metabolism, Prostaglandin |
| | | | | and leukotriene metabolism, p38 MAPK Signaling |
| | | | | Pathway) |
| 1046 | 82601 | NM_013022 | Rho-associated coiled-coil forming | (CCR3 signaling in Eosinophils, Focal adhesion, |
| | | | kinase 2 | Nogo-A Signal Transduction Pathway and Axon |
| | | | | Regeneration, Phosphatidylinositol signaling |
| | | | | system, Regulation of actin cytoskeleton, Rho- |
| | | | | family Proteins in Cell Adhesion and Cancer, |
| | | | | TGF-beta signaling pathway, The Role of the |
| | | | | Cxcr4 Chemokine Receptor and pVHL Tumor |
| | | | | Suppressor in Metastasis, Writ signaling |
| | | | | pathway) |
| 1047 | 78773 | U39571 | | |
| 1048 | 78775 | U39608 | | |
| 1049 | 82520 | NM_024139 | calcium binding protein p22 | Association of Signaling Intermediates With |
| | | | | Sodium-Hydrogen Exchanger NHE1 |
| 1050 | 78778 | NM_019142 | protein kinase, AMP-activated, alpha | (ChREBP regulation by carbohydrates and |
| | | | 1 catalytic subunit | cAMP, Inhibition of Protein Synthesis by AMP |
| | | | | Kinase, Inositol phosphate metabolism, |
| | | | | Nicotinate and nicotinamide metabolism, |
| | | | | Phosphatidylinositol signaling system, Reversal |
| | | | | of Insulin Resistance by Leptin) |
| 1051 | 76916 | NM_012786 | Cytochrom c oxidase subunit VIII-H | Oxidative phosphorylation |
| | | | (heart/muscle) | |
| 1027 | 78779 | NM_057103 | A kinase (PRKA) anchor protein | |
| | | | (gravin) 12 | |
| 1052 | 82715 | NM_012991 | nuclear pore associated protein | |
| 1053 | 76765 | NM_138867 | hypoxia up-regulated 1 | |
| 1054 | 82236 | NM_012894 | adenosine deaminase, RNA-specific, | |
| | | | B1 | |
| 1055 | 78781 | U47014 | proprotein convertase subtilisin/kexin | |
| | | | type 5 | |
| 1056 | 80045 | NM_022184 | calcium/calmodulin-dependent | (CASK Protein Interactions, LIN Transport |
| | | | serine protein kinase | Complex, PALS Membrane Complexes, |
| | | | | Regulation of Inward Rectifier Potassium |
| | | | | Channels, Tight junction) |
| 1057 | 76919 | U47313 | | |
| 1058 | 76921 | NM_133561 | brain protein 44-like | |
| 1059 | 76101 | NM_138515 | cytochrome P450, family 2, | (Fatty acid metabolism, Tryptophan metabolism) |
| | | | subfamily d, polypeptide 22 | |
| 1060 | 76754 | NM_053887 | mitogen activated protein kinase | (Angiotensin II mediated activation of JNK |
| | | | kinase kinase 1 | Pathway via Pyk2 dependent signaling, BCR |
| | | | | Signaling Pathway, CD40L Signaling Pathway, |
| | | | | Ceramide Signaling Pathway, EGF Signaling |
| | | | | Pathway, FAS signaling pathway (CD95), Fc |
| | | | | Epsilon Receptor I Signaling in Mast Cells, HIV-I |
| | | | | Nef: negative effector of Fas and TNF, Human |
| | | | | Cytomegalovirus and Map Kinase Pathways, |
| | | | | Inhibition of Cellular Proliferation by Gleevec, |
| | | | | Keratinocyte Differentiation, Links between Pyk2 |
| | | | | and Map Kinases, MAPK signaling pathway, |
| | | | | MAPKinase Signaling Pathway, Map Kinase |
| | | | | Inactivation of SMRT Corepressor, NF-kB |
| | | | | Signaling Pathway, Neuropeptides VIP and |
| | | | | PACAP inhibit the apoptosis of activated T cells, |
| | | | | PDGF Signaling Pathway, Phosphatidylinositol |
| | | | | signaling system, Rac 1 cell motility signaling |
| | | | | pathway, Role of MAL in Rho-Mediated Activation |
| | | | | of SRF, Signal transduction through IL1R, T Cell |
| | | | | Receptor Signaling Pathway, TNF/Stress Related |
| | | | | Signaling, TNFR1 Signaling Pathway, TNFR2 |
| | | | | Signaling Pathway, The 4-1BB-dependent |
| | | | | immune response, Toll-Like Receptor Pathway, |
| | | | | fMLP induced chemokine gene expression in |
| | | | | HMC-1 cells, p38 MAPK Signaling Pathway) |
| 1061 | 82488 | U49099 | | |
| 1062 | 76767 | NM_012922 | caspase 3 | (Alzheimer's disease, Apoptosis, Apoptotic DNA |
| | | | | fragmentation and tissue homeostasis, Apoptotic |
| | | | | Signaling in Response to DNA Damage, B Cell |
| | | | | Survival Pathway, Caspase Cascade in |
| | | | | Apoptosis, D4-GDI Signaling Pathway, |
| | | | | Dentatorubropallidoluysian atrophy (DRPLA), |
| | | | | FAS signaling pathway (CD95), HIV-I Nef: |
| | | | | negative effector of Fas and TNF, Huntington's |
| | | | | disease, Induction of apoptosis through DR3 and |
| | | | | DR4/5 Death Receptors, MAPK signaling |
| | | | | pathway, Role of Mitochondria in Apoptotic |
| | | | | Signaling, Stress Induction of HSP Regulation, |
| | | | | TNFR1 Signaling Pathway, TSP-1 Induced |
| | | | | Apoptosis in Microvascular Endothelial Cell) |
| 1063 | 80029 | NM_013005 | phosphatidylinositol 3-kinase, | (Apoptosis, Focal adhesion, Jak-STAT signaling |
| | | | regulatory subunit, polypeptide 1 | pathway, Phosphatidylinositol signaling system, |
| | | | | Regulation of actin cytoskeleton, Toll-like receptor |
| | | | | signaling pathway) |
| 552 | 82494 | NM_053891 | cyclin-dependent kinase 5, | (Deregulation of CDK5 in Alzheimers Disease, |
| | | | regulatory subunit 1 (p35) | Lissencephaly gene (LIS1) in neuronal migration |
| | | | | and development, Phosphorylation of MEK1 by |
| | | | | cdk5/p35 down regulates the MAP kinase |
| | | | | pathway, Rac 1 cell motility signaling pathway, |
| | | | | Reelin Signaling Pathway, Regulation of ck1/cdk5 |
| | | | | by type 1 glutamate receptors) |
| 1064 | 78801 | NM_022175 | placentae and embryos oncofetal | |
| | | | gene | |
| 1065 | 78807 | U52950 | microtubule-associated protein 1b | |
| 1066 | 82243 | U53184 | LPS-induced TNF-alpha factor | |
| 1067 | 82483 | NM_012892 | amiloride-sensitive cation channel 1, | |
| | | | neuronal (degenerin) | |
| 1068 | 78810 | NM_030999 | corticotropin releasing hormone | Neuroactive ligand-receptor interaction |
| | | | receptor 1 | |
| 1069 | 82264 | U53513 | glycine-, glutamate-, | |
| | | | thienylcyclohexylpiperidine-binding | |
| | | | protein | |
| 1070 | 82267 | NM_031062 | mevalonate (diphospho) | Biosynthesis of steroids |
| | | | decarboxylase | |
| 1071 | 78811 | U53873 | | |
| 529 | 76706 | NM_022934 | DnaJ-like protein | |
| 1072 | 78812 | NM_022619 | solute carrier family 7 (cationic | |
| | | | amino acid transporter, y+ system), | |
| | | | member 2 | |
| 1073 | 80031 | NM_031089 | parathyroid hormone receptor 2 | Neuroactive ligand-receptor interaction |
| 1074 | 82684 | NM_013029 | sialyltransferase 8 C | |
| 1075 | 79994 | NM_031665 | syntaxin 6 | |
| 1076 | 82484 | NM_017255 | purinergic receptor P2Y, G-protein | (Ion Channel and Phorbal Esters Signaling |
| | | | coupled 2 | Pathway, Neuroactive ligand-receptor interaction) |
| 1077 | 79952 | U57049 | 5,10-methylenetetrahydrofolate | One carbon pool by folate |
| | | | reductase | |
| 579 | 78820 | NM_031978 | proteasome (prosome, macropain) | Proteasome |
| | | | 26S subunit, non-ATPase, 1 | |
| 1078 | 82524 | NM_134332 | granzyme C | |
| 1079 | 79982 | NM_153466 | natural killer cell protease 7 | |
| 1080 | 82577 | NM_013044 | tropomodulin 1 | |
| 1081 | 79961 | NM_024394 | 5-hydroxytryptamine (serotonin) | Calcium signaling pathway |
| | | | receptor 3a | |
| 1082 | 78834 | NM_022529 | mitochondrial ribosomal protein L23 | |
| 1083 | 80063 | NM_031123 | stanniocalcin 1 | |
| 1084 | 76779 | NM_024487 | GrpE-like 1, mitochondrial | |
| 1085 | 78836 | NM_139090 | active receptor-like kinase 7 | (Adherens junction, MAPK signaling pathway, |
| | | | | Phosphatidylinositol signaling system, TGF-beta |
| | | | | signaling pathway) |
| 639 | 78837 | NM_031614 | thioredoxin reductase 1 | Pyrimidine metabolism |
| 1086 | 76927 | NM_013084 | acyl-Coenzyme A dehydrogenase, | Bile acid biosynthesis |
| | | | short/branched chain | |
| 1087 | 78838 | NM_053600 | fasciculation and elongation protein | |
| | | | zeta 2 (zygin II) | |
| 1088 | 78839 | NM_001008335 | eukaryotic translation initiation factor | (Eukaryotic protein translation, Internal Ribosome |
| | | | 4A2 (predicted) | Entry Pathway, Regulation of eIF4e and p70 S6 |
| | | | | Kinase, mTOR Signaling Pathway) |
| 1089 | 82644 | NM_031054 | matrix metallopeptidase 2 | (Inhibition of Matrix Metalloproteinases, Sexual |
| | | | | Differentiation of the Reproductive System) |
| 1090 | 78843 | NM_021677 | pregnancy-specific beta 1- | |
| | | | glycoprotein | |
| 1091 | 78844 | U66293 | pregnancy-specific beta 1- | |
| | | | glycoprotein | |
| 1092 | 78845 | NM_013107 | bone morphogenetic protein 6 | TGF-beta signaling pathway |
| 1093 | 80068 | NM_138863 | leukotriene B4 12- | |
| | | | hydroxydehydrogenase | |
| 1094 | 80054 | NM_013130 | SMAD, mothers against DPP | (ALK in cardiac myocytes, CTCF: First Multivalent |
| | | | homolog 1 (Drosophila) | Nuclear Factor, TGF-beta signaling pathway) |
| 1095 | 80074 | NM_019620 | zinc finger protein 386 (Kruppel-like) | |
| 1096 | 78848 | NM_012596 | leptin receptor | (Cytokine-cytokine receptor interaction, Jak-STAT |
| | | | | signaling pathway, Neuroactive ligand-receptor |
| | | | | interaction, Reversal of Insulin Resistance by |
| | | | | Leptin) |
| 112 | 76776 | NM_017318 | protein tyrosine kinase 2 beta | (Angiotensin II mediated activation of JNK |
| | | | | Pathway via Pyk2 dependent signaling, Bioactive |
| | | | | Peptide Induced Signaling Pathway, CXCR4 |
| | | | | Signaling Pathway, Calcium Signaling by HBx of |
| | | | | Hepatitis B virus, Calcium signaling pathway, IL-7 |
| | | | | Signal Transduction, Ion Channel and Phorbal |
| | | | | Esters Signaling Pathway, Links between Pyk2 |
| | | | | and Map Kinases, Pertussis toxin-insensitive |
| | | | | CCR5 Signaling in Macrophage, Ras- |
| | | | | Independent pathway in NK cell-mediated |
| | | | | cytotoxicity, Role of nicotinic acetylcholine |
| | | | | receptors in the regulation of apoptosis, Signaling |
| | | | | of Hepatocyte Growth Factor Receptor, Thrombin |
| | | | | signaling and protease-activated receptors) |
| 1097 | 76789 | NM_013129 | interleukin 15 | (Cytokine Network, Cytokine-cytokine receptor |
| | | | | interaction, Cytokines and Inflammatory |
| | | | | Response, Jak-STAT signaling pathway) |
| 1097 | 76790 | NM_013129 | interleukin 15 | (Cytokine Network, Cytokine-cytokine receptor |
| | | | | interaction, Cytokines and Inflammatory |
| | | | | Response, Jak-STAT signaling pathway) |
| 1098 | 80122 | NM_053903 | ephrin A5 | |
| 1099 | 82847 | U70050 | jagged 2 | Notch signaling pathway |
| 1100 | 76931 | NM_019310 | interleukin 8 receptor, alpha | Cytokine-cytokine receptor interaction |
| 1101 | 82581 | NM_012867 | ninjurin 1 | |
| 1102 | 80319 | NM_012977 | lectin, galactose binding, soluble 9 | |
| 1102 | 80320 | NM_012977 | lectin, galactose binding, soluble 9 | |
| 1103 | 80181 | NM_053585 | MAP-kinase activating death domain | TNFR1 Signaling Pathway |
| 71 | 78865 | NM_012551 | early growth response 1 | (Phosphorylation of MEK1 by cdk5/p35 down |
| | | | | regulates the MAP kinase pathway, Regulation of |
| | | | | Steroidogenesis by Orphan NuclearReceptor SF- |
| | | | | 1) |
| 1104 | 78872 | U75412 | | |
| 1105 | 76936 | NM_130431 | heat shock 27 kD protein 2 | (Downregulated of MTA-3 in ER-negative Breast |
| | | | | Tumors, MAPK signaling pathway, Stress |
| | | | | Induction of HSP Regulation, p38 MAPK |
| | | | | Signaling Pathway) |
| 1106 | 82650 | U75916 | tight junction protein 2 | Tight junction |
| 1107 | 82651 | NM_022952 | adaptor-related protein complex 2, | |
| | | | sigma 1 subunit | |
| 1108 | 78873 | NM_138509 | microtubule-associated protein, | |
| | | | RP/EB family, member 1 | |
| 1109 | 78874 | U75921 | | |
| 1110 | 78875 | U75923 | isoleucine-tRNA synthetase | Aminoacyl-tRNA biosynthesis |
| 1111 | 80287 | NM_053615 | casein kinase 1, alpha 1 | (Circadian rhythm, Deregulation of CDK5 in |
| | | | | Alzheimers Disease, Hypoxia and p53 in the |
| | | | | Cardiovascular system, NFAT and Hypertrophy of |
| | | | | the heart (Transcription in the broken heart), |
| | | | | WNT Signaling Pathway, Wnt signaling pathway) |
| 1112 | 78894 | U77829 | growth arrest specific 5 | |
| 1113 | 82606 | NM_031595 | proteasome (prosome, macropain) | Proteasome |
| | | | 26S subunit, ATPase 3 | |
| 1114 | 78895 | NM_147136 | rRNA promoter binding protein | |
| 1115 | 78902 | NM_133289 | sodium channel, voltage-gated, type | |
| | | | 9, alpha polypeptide | |
| 1116 | 78903 | NM_022203 | calcium-activated potassium channel | |
| | | | beta subunit | |
| 1117 | 76822 | NM_031053 | mutL homolog 1 (E. coli) | |
| 1118 | 78905 | NM_053909 | neurofascin | |
| 1118 | 78906 | NM_053909 | neurofascin | |
| 1119 | 78907 | NM_032066 | smooth muscle-specific 17 beta- | (Bile acid biosynthesis, Butanoate metabolism, |
| | | | hydroxysteroid dehydrogenase type 3 | Fructose and mannose metabolism, Galactose |
| | | | | metabolism, Glycerophospholipid metabolism, |
| | | | | Glycine, serine and threonine metabolism, Lysine |
| | | | | degradation, Nucleotide sugars metabolism, |
| | | | | TIM23 Translocase) |
| 1120 | 82945 | NM_133525 | chromosome 6 open reading frame | |
| | | | 108 | |
| 1121 | 82913 | NM_013217 | afadin | (Adherens junction, Nectin Intercellular Adhesion |
| | | | | Complexes, Tight junction) |
| 1122 | 78914 | U83666 | budding uninhibited by | (Cell cycle, Phosphatidylinositol signaling system) |
| | | | benzimidazoles 1 homolog, beta (S. cerevisiae) | |
| 1123 | 78916 | NM_012736 | glycerol-3-phosphate | (Electron Transport Reaction in Mitochondria, |
| | | | dehydrogenase 2 | Glycerophospholipid metabolism) |
| 1124 | 82640 | NM_053911 | pleckstrin homology, Sec7 and | ADP-Ribosylation Factor |
| | | | coiled/coil domains 2 | |
| 1125 | 78919 | NM_022398 | 2-oxoglutarate carrier | (Malate-aspartate shuttle, Shuttle for transfer of |
| | | | | acetyl groups from mitochondria to the cytosol) |
| 1126 | 78921 | NM_031666 | synaptotagmin X | |
| 1127 | 78922 | NM_022206 | unc-5 homolog A (C. elegans) | |
| 1128 | 78923 | NM_022207 | unc-5 homolog B (C. elegans) | |
| 1129 | 82660 | NM_012964 | hyaluronan mediated motility | |
| | | | receptor | |
| 66 | 78927 | NM_030987 | guanine nucleotide binding protein, | (Activation of Csk by cAMP-dependent Protein |
| | | | beta 1 | Kinase Inhibits Signaling through the T Cell |
| | | | | Receptor, Activation of cAMP-dependent protein |
| | | | | kinase, PKA, Aspirin Blocks Signaling Pathway |
| | | | | Involved in Platelet Activation, Attenuation of |
| | | | | GPCR Signaling, Bioactive Peptide Induced |
| | | | | Signaling Pathway, Blood Pressure and RGS-2, |
| | | | | CCR3 signaling in Eosinophils, CXCR4 Signaling |
| | | | | Pathway, ChREBP regulation by carbohydrates |
| | | | | and cAMP, Corticosteroids and cardioprotection, |
| | | | | Ephrins and Ephs: forward and reverse signalling, |
| | | | | Erk1/Erk2 Mapk Signaling pathway, Formation of |
| | | | | Phagosomes and Recruitment of Endoplasmic |
| | | | | Reticulum, G-Protein Signaling Through Tubby |
| | | | | Proteins, How Progesterone Initiates the Oocyte |
| | | | | Maturation, Ion Channels and Their Functional |
| | | | | Role in Vascular Endothelium, PKC-catalyzed |
| | | | | phosphorylation of inhibitory phosphoprotein of |
| | | | | myosin phosphatase, Phospholipids as signalling |
| | | | | intermediaries, Role of beta-arrestins in the |
| | | | | activation and targeting of MAP kinases, Roles of |
| | | | | beta-arrestin-dependent Recruitment of Src |
| | | | | Kinases in GPCR Signaling, Signaling Pathway |
| | | | | from G-Protein Families, The Role of Slit-Robo |
| | | | | Pathway in Axon Guidance, Thrombin signaling |
| | | | | and protease-activated receptors, beta-arrestins |
| | | | | in GPCR Desensitization, fMLP induced |
| | | | | chemokine gene expression in HMC-1 cells) |
| 1130 | 78933 | NM_053360 | SH3-domain kinase binding protein 1 | CBL mediated ligand-induced downregulation of |
| | | | | EGF receptors |
| 1131 | 78936 | NM_172039 | high density lipoprotein binding | |
| | | | protein | |
| 1132 | 78938 | NM_032072 | amyloid beta precursor protein | Alzheimer's disease |
| | | | binding protein 1 | |
| 1133 | 78942 | NM_019358 | glycoprotein 38 | |
| 1134 | 80203 | NM_053583 | Olf-1/EBF associated Zn finger | |
| | | | protein Roaz | |
| 1135 | 80300 | NM_078621 | chemokine binding protein 2 | |
| 1136 | 78945 | NM_031828 | potassium large conductance | |
| | | | calcium-activated channel, subfamily | |
| | | | M, alpha member 1 | |
| 1137 | 80188 | NM_012870 | tumor necrosis factor receptor | Cytokine-cytokine receptor interaction |
| | | | superfamily, member 11b | |
| | | | (osteoprotegerin) | |
| 1138 | 82933 | NM_173143 | abl-interactor 2 | Y branching of actin filaments |
| 1139 | 78949 | NM_053598 | nudix (nucleoside diphosphate linked | |
| | | | moiety X)-type motif 4 | |
| 1140 | 80253 | NM_024159 | disabled homolog 2 (Drosophila) | |
| 309 | 82733 | NM_031043 | glycogenin 1 | |
| 455 | 78964 | NM_031577 | growth hormone releasing hormone | Neuroactive ligand-receptor interaction |
| 1141 | 82570 | NM_012493 | alpha-fetoprotein | |
| 1142 | 76948 | NM_138974 | glutathione S-transferase, pi 2 | (Glutathione metabolism, Multi-Drug Resistance |
| | | | | Factors) |
| 1143 | 82357 | NM_012998 | prolyl 4-hydroxylase, beta | (Arginine and proline metabolism, Hypoxia- |
| | | | polypeptide | Inducible Factor in the Cardiovascular System, |
| | | | | Vitamin C in the Brain) |
| 1144 | 78968 | X03914 | | |
| 1145 | 82436 | NM_017251 | gap junction membrane channel | |
| | | | protein beta 1 | |
| 1033 | 76731 | NM_012610 | nerve growth factor receptor (TNFR | (Erk1/Erk2 Mapk Signaling pathway, Nerve |
| | | | superfamily, member 16) | growth factor pathway (NGF), Nogo-A Signal |
| | | | | Transduction Pathway and Axon Regeneration, |
| | | | | Phosphorylation of MEK1 by cdk5/p35 down |
| | | | | regulates the MAP kinase pathway) |
| 1146 | 82384 | NM_013067 | ribophorin I | N-Glycan biosynthesis |
| 277 | 78973 | NM_012559 | fibrinogen, gamma polypeptide | (Acute Myocardial Infarction, C-Reactive Protein, |
| | | | | Apo-B in Lipid Metabolism and Cardiovascular |
| | | | | Disease, Complement and coagulation cascades, |
| | | | | Extrinsic Prothrombin Activation Pathway, |
| | | | | Fibrinolysis Pathway, Intrinsic Prothrombin |
| | | | | Activation Pathway, Platelet thrombus formation |
| | | | | at injury sites, Role of Peroxisome Proliferator- |
| | | | | Activated Receptor in Inflammation) |
| 1147 | 78974 | NM_017084 | glycine N-methyltransferase | Glycine, serine and threonine metabolism |
| 1148 | 76736 | NM_013168 | hydroxymethylbilane synthase | (Hemoglobin''s Chaperone, Porphyrin and |
| | | | | chlorophyll metabolism) |
| 1149 | 78981 | NM_021655 | chromogranin A | |
| 1150 | 78982 | NM_013018 | RAB3A, member RAS oncogene | Rab GTPases Mark Targets In The Endocytotic |
| | | | family | Machinery |
| 1151 | 82354 | NM_012618 | S100 calcium-binding protein A4 | |
| 1152 | 78984 | NM_012497 | aldolase C, fructose-biphosphate | (Fructose and mannose metabolism, Glycolysis/ |
| | | | | Gluconeogenesis, Inositol metabolism, Pentose |
| | | | | phosphate pathway) |
| 1153 | 78986 | NM_153307 | cytochrome P450, family 4, | Fatty acid metabolism |
| | | | subfamily a, polypeptide 10 | |
| 284 | 78998 | NM_012793 | guanidinoacetate methyltransferase | (Arginine and proline metabolism, Glycine, serine |
| | | | | and threonine metabolism, Urea cycle and |
| | | | | metabolism of amino groups) |
| 1154 | 79012 | NM_001008370 | similar to Ras-related protein Rab- | |
| | | | 1B | |
| 1155 | 76958 | NM_031969 | calmodulin 1 | (Calcium signaling pathway, Huntington's |
| | | | | disease, Phosphatidylinositol signaling system) |
| 1156 | 79025 | X14848 | | |
| 1157 | 82350 | NM_173301 | preprotrypsinogen IV | |
| 1158 | 76963 | NM_021863 | heat shock protein 2 | |
| 399 | 79040 | NM_017040 | protein phosphatase 2a, catalytic | (TGF-beta signaling pathway, Tight junction, Wnt |
| | | | subunit, beta isoform | signaling pathway) |
| 1159 | 76722 | NM_012937 | crystallin, beta B2 | |
| 423 | 82271 | NM_031975 | parathymosin | |
| 1160 | 79044 | X16623 | | |
| 1161 | 79048 | NM_031530 | chemokine (C-C motif) ligand 2 | Cytokine-cytokine receptor interaction |
| 1161 | 79049 | NM_031530 | chemokine (C-C motif) ligand 2 | Cytokine-cytokine receptor interaction |
| 1162 | 79051 | NM_012492 | adrenergic receptor, beta 2 | (Calcium signaling pathway, Corticosteroids and |
| | | | | cardioprotection, Cystic fibrosis transmembrane |
| | | | | conductance regulator and beta 2 adrenergic |
| | | | | receptor pathway, Neuroactive ligand-receptor |
| | | | | interaction, Phospholipase C-epsilon pathway) |
| 1163 | 79060 | NM_001007598 | ribosomal protein L9 | |
| 1164 | 79063 | NM_013023 | retinal S-antigen | |
| 772 | 82424 | NM_054006 | unr protein | |
| 1016 | 79070 | NM_053865 | reticulon 1 | |
| 1165 | 76971 | NM_032080 | glycogen synthase kinase 3 beta | (ALK in cardiac myocytes, Alzheimer's disease, |
| | | | | Cell Cycle: G1/S Check Point, Cell cycle, |
| | | | | Deregulation of CDK5 in Alzheimers Disease, |
| | | | | Focal adhesion, Inactivation of Gsk3 by AKT |
| | | | | causes accumulation of b-catenin in Alveolar |
| | | | | Macrophages, Molecular Interactions of Integrin- |
| | | | | Linked Kinase, Multi-step Regulation of |
| | | | | Transcription by Pitx2, NFAT and Hypertrophy of |
| | | | | the heart (Transcription in the broken heart), |
| | | | | PAR/EMK/MARK, a Novel Family of Protein |
| | | | | KinasesThat Phosphorylate Microtubule- |
| | | | | associated Proteins, Phosphatidylinositol |
| | | | | signaling system, Phosphoinositides and their |
| | | | | downstream targets., Presenilin action in Notch |
| | | | | and Wnt signaling, Regulation of Insulin and IGF |
| | | | | Signaling by IRS Proteins, Regulation of eIF2, |
| | | | | Rho-family Proteins in Cell Adhesion and Cancer, |
| | | | | Segmentation Clock, Skeletal muscle hypertrophy |
| | | | | is regulated via AKT/mTOR pathway, Sonic |
| | | | | Hedgehog (Shh) Pathway, Transcriptional |
| | | | | Activation by Amyloid Precursor Protein, WNT |
| | | | | Signaling Pathway, Wnt signaling pathway) |
| 1166 | 79080 | X53504 | | |
| 1167 | 82282 | NM_031008 | adaptor protein complex AP-2, alpha | |
| | | | 2 subunit | |
| 1168 | 82301 | NM_053602 | ATP synthase, H+ transporting, | (ATP synthesis, Oxidative phosphorylation, |
| | | | mitochondrial F0 complex, subunit | Purine metabolism) |
| | | | F6 | |
| 1169 | 82312 | NM_080689 | dynamin 1 | (Endocytotic role of NDK, Phosphins and |
| | | | | Dynamin, Ephrins and Ephs: forward and reverse |
| | | | | signalling, Gamma-aminobutyric Acid Receptor |
| | | | | Life Cycle, Role of beta-arrestins in the activation |
| | | | | and targeting of MAP kinases, Role of syndapins |
| | | | | in vesicle trafficking, Roles of beta-arrestin- |
| | | | | dependent Recruitment of Src Kinases in GPCR |
| | | | | Signaling, Stimulation of Synaptic Vesicle |
| | | | | Recycling by Nitrous Oxide, beta-arrestins in |
| | | | | GPCR Desensitization) |
| 1170 | 79087 | X54617 | | |
| 1171 | 82349 | NM_012783 | basigin | |
| 1172 | 76974 | NM_021836 | Jun-B oncogene | GATA3 participate in activating the Th2 cytokine |
| | | | | genes expression |
| 1173 | 76750 | NM_022229 | heat shock protein 1 (chaperonin) | Prion disease |
| 1174 | 79088 | X54798 | | |
| 1175 | 76748 | NM_013134 | 3-hydroxy-3-methylglutaryl- | Biosynthesis of steroids |
| | | | Coenzyme A reductase | |
| 1176 | 82332 | NM_019331 | proprotein convertase subtilisin/kexin | |
| | | | type 3 | |
| 1177 | 79929 | NM_012742 | forkhead box A1 | |
| 1178 | 79090 | NM_017281 | proteasome (prosome, macropain) | Proteasome |
| | | | subunit, alpha type 4 | |
| 1179 | 79095 | X56448 | cell surface glycoprotein gp42 | |
| 1180 | 82430 | NM_013103 | transcription factor 2 | |
| 1181 | 79104 | NM_031838 | ribosomal protein S2 | Ribosome |
| 1182 | 79113 | X58465 | ribosomal protein S5 | |
| 1183 | 79115 | NM_012490 | acrosin | |
| 1184 | 82525 | NM_053990 | protein tyrosine phosphatase, non- | |
| | | | receptor type 2 | |
| 1185 | 82361 | NM_013190 | phosphofructokinase, liver, B-type | (Fructose and mannose metabolism, Galactose |
| | | | | metabolism, Glycolysis/Gluconeogenesis, |
| | | | | Glycolysis Pathway, Pentose phosphate pathway, |
| | | | | Phosphoinositides and their downstream targets.) |
| 1186 | 79118 | X59375 | | |
| 1187 | 79123 | X59737 | creatine kinase, mitochondrial 1, | (Arginine and proline metabolism, Mitochondrial |
| | | | ubiquitous | Permeability Transition Pore Complex, Urea cycle |
| | | | | and metabolism of amino groups) |
| 1187 | 79124 | X59737 | creatine kinase, mitochondrial 1, | (Arginine and proline metabolism, Mitochondrial |
| | | | ubiquitous | Permeability Transition Pore Complex, Urea cycle |
| | | | | and metabolism of amino groups) |
| 1188 | 79127 | NM_052799 | nitric oxide synthase 1, neuronal | Arginine and proline metabolism |
| 1189 | 82393 | NM_201415 | ribosomal protein L17 | |
| 1190 | 79132 | NM_080478 | amyloid beta (A4) precursor protein- | (Alzheimer's disease, Transcriptional Activation |
| | | | binding, family B, member 1 | by Amyloid Precursor Protein) |
| 1191 | 79133 | NM_013026 | syndecan 1 | (CASK Protein Interactions, ECM-receptor |
| | | | | interaction, Matrix Metalloproteinase 1 in Cell |
| | | | | Signaling) |
| 312 | 79984 | NM_012854 | interleukin 10 | (Adaptive Immune Response to Cancer Cells, |
| | | | | Antigen Dependent B Cell Activation, Cytokine |
| | | | | Network, Cytokine-cytokine receptor interaction, |
| | | | | Cytokines and Inflammatory Response, Dendritic |
| | | | | cells in regulating TH1 and TH2 Development, IL- |
| | | | | 10 Anti-inflammatory Signaling Pathway, |
| | | | | Immunotherapeutic Approaches to Alzheimer''s |
| | | | | Disease, Jak-STAT signaling pathway, PPAR |
| | | | | Gamma in Inflammation Control) |
| 974 | 82411 | NM_024125 | CCAAT/enhancer binding protein | IL 6 signaling pathway |
| | | | (C/EBP), beta | |
| 1192 | 79145 | X62145 | ribosomal protein L8 | |
| 1193 | 79149 | NM_198753 | ribosomal protein L3 | Ribosome |
| 1194 | 79153 | X62325 | | |
| 1195 | 79166 | X62950 | | |
| 1196 | 79167 | X62951 | | |
| 1197 | 79170 | NM_133290 | zinc finger protein 36 | |
| 1198 | 79824 | NM_053988 | calbindin 2 | |
| 1199 | 82287 | NM_031119 | Sjogren syndrome antigen B | (DNA Mismatch Repair, RNA polymerase III |
| | | | | transcription) |
| 1200 | 79893 | NM_019268 | solute carrier family 8 | Calcium signaling pathway |
| | | | (sodium/calcium exchanger), | |
| | | | member 1 | |
| 1201 | 76730 | NM_053986 | myosin Ib | |
| 1202 | 79182 | X70667 | melanocortin 3 receptor | |
| 1203 | 82425 | NM_134352 | plasminogen activator, urokinase | Complement and coagulation cascades |
| | | | receptor | |
| 1204 | 76720 | X72757 | | |
| 1205 | 82327 | NM_175756 | Fc receptor, IgG, low affinity IIb | B Lymphocyte Cell Surface Molecules |
| 1206 | 79185 | NM_130738 | SNRPN upstream reading frame | (Spliceosomal Assembly, U1snRNP Export and |
| | | | | Import) |
| 1207 | 79186 | NM_019312 | inositol 1,4,5-trisphosphate 3-kinase B | (Inositol phosphate metabolism, |
| | | | | Phosphatidylinositol signaling system) |
| 1208 | 82545 | NM_024382 | serine (or cysteine) proteinase | Complement and coagulation cascades |
| | | | inhibitor, clade D, member 1 | |
| 1209 | 76990 | NM_022516 | polypyrimidine tract binding protein 1 | |
| 1209 | 76991 | NM_022516 | polypyrimidine tract binding protein 1 | |
| 1210 | 82406 | NM_017052 | sorbitol dehydrogenase | Fructose and mannose metabolism |
| 1211 | 79189 | NM_012528 | cholinergic receptor, nicotinic, beta | (Neuromuscular Junction Protiens, Role of |
| | | | polypeptide 1 (muscle) | nicotinic acetylcholine receptors in the regulation |
| | | | | of apoptosis) |
| 1212 | 79190 | NM_019145 | cholinergic receptor, nicotinic, | (Neuromuscular Junction Protiens, Role of |
| | | | gamma polypeptide | nicotinic acetylcholine receptors in the regulation |
| | | | | of apoptosis) |
| 1213 | 79192 | NM_017194 | cholinergic receptor, nicotinic, | |
| | | | epsilon polypeptide | |
| 1214 | 79193 | X74978 | | |
| 1215 | 82414 | X75856 | testis enhanced gene transcript | |
| 1216 | 79196 | NM_001005871 | ATPase, Ca++ transporting, plasma | Calcium signaling pathway |
| | | | membrane 4 | |
| 1217 | 79198 | X76489 | CD9 antigen | |
| 1217 | 79199 | X76489 | CD9 antigen | |
| 1218 | 80285 | NM_017304 | potassium voltage-gated channel, | |
| | | | shaker-related subfamily, beta | |
| | | | member 2 | |
| 1219 | 82466 | NM_031655 | latexin | |
| 1220 | 76791 | NM_212546 | heat shock 70 kD protein 1-like | |
| 1221 | 80024 | X77818 | | |
| 1222 | 82548 | NM_053978 | RAB28, member RAS oncogene | |
| | | | family | |
| 967 | 76994 | NM_031509 | glutathione S-transferase A5 | Glutathione metabolism |
| 1223 | 76995 | NM_019184 | Cytochrome P450, subfamily IIC | (Fatty acid metabolism, Tryptophan metabolism) |
| | | | (mephenytoin 4-hydroxylase) | |
| 1224 | 82210 | NM_057144 | cysteine-rich protein 3 | |
| 1225 | 82331 | NM_080698 | fibromodulin | Small Leucine-rich Proteoglycan (SLRP) |
| | | | | molecules |
| 1226 | 82554 | NM_022597 | cathepsin B | |
| 1227 | 82392 | NM_017271 | nuclear distribution gene C homolog | |
| | | | (Aspergillus) | |
| 1228 | 82223 | NM_053974 | eukaryotic translation initiation factor | (Eukaryotic protein translation, Internal Ribosome |
| | | | 4E | Entry Pathway, NMD; Nonsense-Mediated mRNA |
| | | | | Decay, Regulation of eIF4e and p70 S6 Kinase, |
| | | | | SARS Coronavirus Protease, Skeletal muscle |
| | | | | hypertrophy is regulated via AKT/mTOR pathway, |
| | | | | mTOR Signaling Pathway) |
| 1229 | 79218 | NM_031602 | potassium inwardly-rectifying | |
| | | | channel, subfamily J, member 10 | |
| 1230 | 79221 | NM_001008889 | HIV-induced protein-7-like protease | |
| 1231 | 79993 | NM_012988 | nuclear factor I/A | |
| 1232 | 79223 | X86178 | | |
| 1233 | 80097 | NM_001008724 | fibrinogen, alpha polypeptide | (Acute Myocardial Infarction, C-Reactive Protein, |
| | | | | Apo-B in Lipid Metabolism and Cardiovascular |
| | | | | Disease, Extrinsic Prothrombin Activation |
| | | | | Pathway, Fibrinolysis Pathway, Intrinsic |
| | | | | Prothrombin Activation Pathway, Platelet |
| | | | | thrombus formation at injury sites, Role of |
| | | | | Peroxisome Proliferator-Activated Receptor in |
| | | | | Inflammation) |
| 1234 | 79228 | NM_214821 | olfactory receptor 1413 | |
| 1235 | 79229 | NM_001000363 | olfactory receptor 728 (predicted) | |
| 1236 | 79239 | NM_001000502 | olfactory receptor 1606 | |
| 1237 | 82504 | NM_024391 | hydroxysteroid (17-beta) | Androgen and estrogen metabolism |
| | | | dehydrogenase 2 | |
| 1238 | 82239 | NM_080780 | purinergic receptor P2X, ligand- | (Calcium signaling pathway, Neuroactive ligand- |
| | | | gated ion channel, 5 | receptor interaction) |
| 1239 | 82558 | NM_031722 | coated vesicle membrane protein | |
| 1240 | 79250 | NM_012896 | adenosine A3 receptor | Neuroactive ligand-receptor interaction |
| 1241 | 79988 | NM_053339 | acyl-Coenzyme A oxidase 3, | Fatty acid metabolism |
| | | | pristanoyl | |
| 258 | 82598 | NM_019170 | carbonyl reductase 1 | Prostaglandin and leukotriene metabolism |
| 1242 | 79256 | NM_053619 | complement component 5, receptor 1 | Complement and coagulation cascades, |
| | | | | Neuroactive ligand-receptor interaction) |
| 1243 | 79257 | NM_212505 | immediate early response 3 | |
| 1244 | 77005 | NM_021582 | replication protein A2 | |
| 1245 | 79264 | NM_021697 | potassium channel, subfamily V, | |
| | | | member 1 | |
| 1246 | 79265 | NM_134329 | alcohol dehydrogenase 7 (class IV), | (Bile acid biosynthesis, Fatty acid metabolism, |
| | | | mu or sigma polypeptide | Glycerolipid metabolism, Glycolysis/ |
| | | | | Gluconeogenesis, Tyrosine metabolism) |
| 1247 | 77006 | NM_153314 | UDP-glucuronosyltransferase 2B3 | (Androgen and estrogen metabolism, Pentose |
| | | | precursor, microsomal | and glucuronate interconversions, Porphyrin and |
| | | | | chlorophyll metabolism, Starch and sucrose |
| | | | | metabolism) |
| 1248 | 77007 | NM_012603 | myelocytomatosis viral oncogene | (CTCF: First Multivalent Nuclear Factor, |
| | | | homolog (avian) | Cadmium induces DNA synthesis and |
| | | | | proliferation in macrophages, Erk1/Erk2 Mapk |
| | | | | Signaling pathway, IL-2 Receptor Beta Chain in T |
| | | | | cell Activation, Inhibition of Cellular Proliferation |
| | | | | by Gleevec, Jak-STAT signaling pathway, MAPK |
| | | | | signaling pathway, MAPKinase Signaling |
| | | | | Pathway, Mechanism of Gene Regulation by |
| | | | | Peroxisome Proliferators via PPARa(alpha), |
| | | | | Neuropeptides VIP and PACAP inhibit the |
| | | | | apoptosis of activated T cells, Overview of |
| | | | | telomerase protein component gene hTert |
| | | | | Transcriptional Regulation, Role of EGF Receptor |
| | | | | Transactivation by GPCRs in Cardiac |
| | | | | Hypertrophy, TGF-beta signaling pathway, |
| | | | | Telomeres, Telomerase, Cellular Aging, and |
| | | | | Immortality, The Role Caveolin-1 in Tumour-cell |
| | | | | Invasion, Tumor Suppressor Arf Inhibits |
| | | | | Ribosomal Biogenesis, WNT Signaling Pathway, |
| | | | | Wnt signaling pathway, p38 MAPK Signaling |
| | | | | Pathway) |
| 1248 | 77008 | NM_012603 | myelocytomatosis viral oncogene | (CTCF: First Multivalent Nuclear Factor, |
| | | | homolog (avian) | Cadmium induces DNA synthesis and |
| | | | | proliferation in macrophages, Erk1/Erk2 Mapk |
| | | | | Signaling pathway, IL-2 Receptor Beta Chain in T |
| | | | | cell Activation, Inhibition of Cellular Proliferation |
| | | | | by Gleevec, Jak-STAT signaling pathway, MAPK |
| | | | | signaling pathway, MAPKinase Signaling |
| | | | | Pathway, Mechanism of Gene Regulation by |
| | | | | Peroxisome Proliferators via PPARa(alpha), |
| | | | | Neuropeptides VIP and PACAP inhibit the |
| | | | | apoptosis of activated T cells, Overview of |
| | | | | telomerase protein component gene hTert |
| | | | | Transcriptional Regulation, Role of EGF Receptor |
| | | | | Transactivation by GPCRs in Cardiac |
| | | | | Hypertrophy, TGF-beta signaling pathway, |
| | | | | Telomeres, Telomerase, Cellular Aging, and |
| | | | | Immortality, The Role Caveolin-1 in Tumour-cell |
| | | | | Invasion, Tumor Suppressor Arf Inhibits |
| | | | | Ribosomal Biogenesis, WNT Signaling Pathway, |
| | | | | Wnt signaling pathway, p38 MAPK Signaling |
| | | | | Pathway) |
| 1249 | 79894 | NM_013119 | sodium channel, voltage-gated, type | |
| | | | III, alpha polypeptide | |
| 1250 | 79281 | NM_022696 | heart and neural crest derivatives | |
| | | | expressed transcript 2 | |
| 1251 | 79288 | NM_019255 | calcium channel, voltage-dependent, | |
| | | | gamma subunit 1 | |
| 1252 | 79291 | NM_053762 | zona pellucida glycoprotein 3 | |
| 1253 | 79294 | Y11489 | a disintegrin and metalloprotease | |
| | | | domain 5 | |
| 1254 | 82731 | NM_057213 | ATPase, H+ transporting, V1 subunit | (ATP synthesis, Oxidative phosphorylation) |
| | | | B, isoform 2 | |
| 1255 | 82853 | NM_012656 | secreted acidic cysteine rich | |
| | | | glycoprotein | |
| 1256 | 76378 | NM_138911 | stress-induced-phosphoprotein 1 | Glucocorticoid Receptor-Hsp90 Heterocomplex |
| | | | (Hsp70/Hsp90-organizing protein) | |
| 1257 | 79309 | NM_133529 | calcium binding protein 1 | |
| 1258 | 79319 | NM_019136 | arginine vasopressin receptor 2 | Neuroactive ligand-receptor interaction |
| 1259 | 79325 | Z14118 | platelet derived growth factor | |
| | | | receptor, alpha polypeptide | |
| 1259 | 79326 | Z14118 | platelet derived growth factor | |
| | | | receptor, alpha polypeptide | |
| 1260 | 79327 | NM_031525 | platelet derived growth factor | (Calcium signaling pathway, Focal adhesion, |
| | | | receptor, beta polypeptide | MAPK signaling pathway, Regulation of actin |
| | | | | cytoskeleton) |
| 996 | 79330 | NM_013086 | cAMP responsive element modulator | |
| 833 | 79331 | NM_053994 | pyruvate dehydrogenase E1 alpha 2 | (Butanoate metabolism, Glycolysis/ |
| | | | | Gluconeogenesis, Pyruvate metabolism) |
| 14 | 79333 | NM_212504 | heat shock 70 kD protein 1B | MAPK signaling pathway |
| 1261 | 82221 | NM_024131 | D-dopachrome tautomerase | |
| 14 | 76766 | NM_212504 | heat shock 70 kD protein 1B | MAPK signaling pathway |
| 1262 | 79349 | NM_017094 | growth hormone receptor | (AKT Signaling Pathway, Cytokine-cytokine |
| | | | | receptor interaction, Growth Hormone Signaling |
| | | | | Pathway, Jak-STAT signaling pathway, |
| | | | | Neuroactive ligand-receptor interaction, |
| | | | | Regulation of eIF4e and p70 S6 Kinase, The IGF- |
| | | | | 1 Receptor and Longevity, Trefoil Factors Initiate |
| | | | | Mucosal Healing) |
| 1263 | 79351 | NM_021699 | serine/threonine kinase | (Inositol phosphate metabolism, Nicotinate and |
| | | | | nicotinamide metabolism, Phosphatidylinositol |
| | | | | signaling system) |

The application's sequence listing, which the Patent Office published only in electronic form, follows.

SEQUENCE LISTING (1263 sequences)

SEQ ID NO: 1 - DNA, 1194 bp, Rattus norvegicus
atgaattggcattttcccttcttcatcttgaccacagtgactttatcctctgtgtactcccagctcaactctctgtcactcgaggaactaggctctgacacagggatccaggttttcaatcagatcatcaaatcacagcctcatgagaacgttgtcatttctccgcacgggattgcgtccatcttgggcatgctgcagctgggggctgacggcaggacgaagaagcagctctcaacggtgatgcgatacaatgtgaacggagtcggaaaagtgctgaagaagatcaacaaggctatagtctccaaaaagaataaagacatagtgaccgtggccaatgctgtgtttgtcaggaatggctttaaagtggaagtgccttttgcagcaaggaacaaagaggtgtttcagtgtgaagtacagagtgtgaacttccaggacccggcctctgcttgtgatgccatcaatttttgggtcaaaaatgagacgaggggcatgattgacaacctactttccccaaatctgatcgatagtgtccttaccaaactggtcctcgttaacgcagtgtatttcaagggtttgtggaaatcccggtttcaacctgagaacacgaagaaacggaccttcgtggcaggtgatggaaaatcctaccaagtacccatgctagcccagctctccgtgttccgctctgggtctaccaaaaccccaaatggcttatggtacaacttcattgagctaccctaccatggtgagagcatcagcatgttgatcgccctgccaacagagagctccaccccactgtccgccatcatccctcacatcagtaccaagaccatcaatagctggatgaacaccatggtacccaagaggatgcagctggtcctgcccaagttcacagctctggcacaaacagatctgaaggagccactgaaagcccttggcattactgagatctttgaaccgtcaaaggcaaattttgcaaaaataacaaggtcagagagccttcacgtctctcacatcttgcagaaagcaaaaattgaagtcagcgaagatgggaccaaagccgcagtagtgacaactgcaatcctaattgcaaggtcatcgcctccctggtttatagtagacaggcctttcctgttctgcatccgacacaatcccacaggtgccatcttgttcctggggcaggtgaacaagccctga

SEQ ID NO: 2 - DNA, 296 bp, Rattus norvegicus
  misc_feature (1)..(296): n = a or c or g or t
gtgcctacagagacatgaggctgagctggntcctgacagtactgttcatttgcntgantgccctggtcacagccacaggggccgaagaagcggaagctgcagattggagtgaagaaacgtgtggttcactgtcccatcaagtctagaaagggagatgtcttacacatgcattacacgggaaagctagaagatgggacggagtttgacagcagcctaccacagaaccagccctttnttttctcccttggcactggccaggtcatcaagggctgggaccaggggctacttggggatgt

SEQ ID NO: 3 - DNA, 265 bp, Rattus norvegicus
  misc_feature (1)..(265): n = a or c or g or t
cctgggccagggacggagccgctgcacttcaagatgtaccgcctgagctcgtcagtnctgccccgggccttggccaggccatgcgcacaggacatcttaatggccaaagccttcatagcagtgcagtggccgctacgtacaagtatgtgnaatatgaaggcacaggaacttggatgtggacatgaantctgcgactgacagtgcagctcgggattctaatgtggacagaactnttccgaggcctgggcatgaccctaagctacct

SEQ ID NO: 4 - DNA, 269 bp, Rattus norvegicus
  misc_feature (1)..(269): n = a or c or g or t
cttctaccggcagataaaaagacaccctgggctcatcccaatgatcggnttcatctgcttgggcatgggcagtgccggactctacttgctgcggcttgcccttcgcagccctgatgtctgctgggacagaaagaacaacccagagccctggaaccgcatgantcccaatgaccagtacaagttccttgctgtttccancgactacaagaagctgaagaaggaccggcctgacttctaaagcnggggtggggggtgttccatctaaatca

SEQ ID NO: 5 - DNA, 3215 bp, Rattus norvegicus
gacctgcgcgcggtttagtgggcggaccgcgctgctggaggtgtgaggacctgagactccgggttgggggggtggaggcggctcctgcgaccgaaaaggacttgcgactctccggccacgcaccatgagggtcctgtgggtgctgggcctctgctgcgtcctgctgaccttcgggtttgtgagagctgacgatgaagtcgatgtggatggcacggtagaagaggacctgggtaaaagtagagaaggctcacggacagacgatgaagttgtgcagagagaggaagaagctattcagttggatggtttaaatgcatcacaaataagggaacttagagaaaaatcggaaaagttcgccttccaagctgaagttaacaggatgatgaaacttatcatcaattctttgtataaaaataaagagattttcctgagagaactgatttcaaatgcttctgatgctttagacaagataaggctcatctcactaactgatgaaaatgcacttgctggaaatgaggagttgacggtcaagattaagtgtgacagagagaaaaacctgctgcatgtcacagacacgggtgtaggaatgaccagagaggagctggttaaaaacctgggcaccatagccaaatctggaaccagcgagtttctaaacaaaatgacagaagcacaagaagacggtcagtcaacttccgaactgatcggccagtttggtgtcggtttttattctgccttccttgtagcagataaggtcattgtcacgtcgaaacacaacaatgatacccagcacatctgggaatccgactctaatgaattctctgtgattgctgacccaagaggaaacacactaggtcgtggaacaacgattactcttgtcttaaaagaagaagcatctgattaccttgaattggatacaattaaaaatctcgtcagaaagtattctcagttcatcaactttcccatctatgtgtggagtagcaagactgagactgtggaggagcccttggaagaagacgaaacagcacaagaagagaaggaggaagctgatgatgaagccgcagtagaagaggaggaggaagagaagaagccaaagacgaagaaagttgaaaagactgtgtgggactgggaacttatgaatgacatcaaaccaatatggcagaggccgtccaaagaagtagaagaagacgagtacaaagctttctacaagtcgttttcaaaggaaagtgatgaccccatggcttatatccactttactgcagaaggggaagtcaccttcaagtcaattttgtttgtgcctacatctgcgcctcgaggtctgtttgacgagtatggatctaagaagagcgattatattaagctctatgtgcgccgagtgttcatcacagacgacttccatgacatgatgcccaagtacctgaattttgtcaaaggtgttgtggattccgatgatctccccctcaatgtttcccgtgagactcttcagcaacataaattgctcaaggtgattaggaagaagcttgtccgcaaaactctggacatgatcaagaagatcgctgatgagaaatataatgacactttctggaaagaatttggcaccaatatcaagcttggtgtgattgaagatcactcaaatcgaacacggcttgctaaacttcttaggttccagtcttctcaccattcaactgacattactagtttagaccagtatgtggaaagaatgaaggaaaaacaggacaaaatctacttcatggctgggtcaagcagaaaagaggctgaatcttctccgtttgttgagaggcttctgaagaagggctatgaagttatttacctcacagagcccgtggatgaatactgcattcaggctcttcctgagtttgatgggaaacggttccagaatgttgccaaagaaggagtgaagtttgatgagagtgagaaaagtaaagaaagtcgggaagcaacagagaaggagtttgagcctctgctcaactggatgaaagataaggccctcaaggacaaggtatttggaccgcagactgtagtgtctccacacaggaattaacagcaagctagtctacacccagtttgttcattaccactagcaactgcagacagtggcgtgtgcctcgggtactcgggagtgacaacagggacctggacatagagctcagtgatacattcatttgttgtggaagacccacctgcccctcaaaaatgccatcaaatacagggcagtgtgagtttgcaacttacagcagtttcctgttgctgtaatactgatttttactaagtttttacaggtttagtataaatttgtagctgaaaaaattcagattcactgagtgtctatgctctgggatggtgactgacactgctgatccttccttctgtctaatgtttctcattctaagatcgaaaaggctgtggtgtcccagcgcctcacagagtctccctgtgcccttgtggccagccagtatggatggtctggaaacatggagaggatcatgaaggcacaagcataccagacgggcaaggacatctctacaaattactatgccagtcagaagaaaacgtttgaaattaatcctagacacccactgatcagggacatgctgcggagggttaaggaagatgaagatgacaagactgtcatggatcttgctgtagttttgtttgaaacggcaactcttcggtcaggataccttctacccgacaccaaggcatatggagacaggatagaaaggatgctccgcctcagcttaaacattgaccctgaagcacaggtagaggaagagccagaggaggagcctgaagacaccacagaagacaccacagatgactccgagcaggatgaagaagagacagacgcaggggcagaagaagaagaagaagaacaggaaacagaaaaggaacctacagagaaggatgaattgtaattatactctcactatgaatcctgtgtggagagggaatgtgacattttaaagttatttcttttgaaagacttgttttggatgctcccccaagcctccctctcccctgcactgtaaaatgttgggattatgggtcacaggaagaagtggtttttttagttgaattttttttttttaacattcctcctgaatgtaaatttgtactatttaactgactattggtgtaaaatcttgtcatgtgtataaaaataaaaaaagatcccaaaaaaaaaaaaaaaaaaaaaaaaa

SEQ ID NO: 6 - DNA, 2519 bp, Rattus norvegicus
ggggtcagggggatccggacaaatcagcgggacaacttggtgagctctagaggaaagccatcatgttaaggatacctgtaaaaagggccttgataggcctttctaagtctcctaaaggatatgttcgatcaactggcacagcagcaagtaacttgattgaagtatttgttgatggtcagtctgtcatggtggaaccaggaaccactgtcctgcaggcctgcgagaaggttggcatgcaaatccctcgattctgttaccatgaaaggttgtctgtagctggaaattgcaggatgtgcctggtagagattgagaaagctccaaaggttgttgctgcttgtgctatgcctgttatgaagggctggaatatcctgacaaactcagaaaaatctaagaaagccagagaaggtgtgatggagtttttattagcaaatcacccattggattgtcctatttgtgaccagggaggtgaatgtgatctacaggaccagtccatgatgtttggaagtgataggagccgatttctagaggggaagcgtgctgtggaggacaagaacattgggcccctggtaaagaccatcatgactagatgcatacagtgtacccgctgcatcaggtttgcaagtgaaattgcaggagtagatgatttgggaacaacggggagaggaaatgacatgcaagttggaacatacattgagaaaatgttcatgtctgaactgtctgggaacatcattgatatctgccctgtcggggccctaacctctaagccttatgcctttactgcccggccttgggaaacaagaaagacagagtccattgatgtaatggatgcagtgggaagtaacattgtggttagcacaagaactggagaggtaatgaggattttgccaagaatgcatgaagatattaatgaagaatggatctctgataaaaccagatttgcctatgatggactgaaacggcaaagacttaccgaaccaatggtcagaaatgaaaaggggcttttaacttatacctcctgggaagatgcactctctcgtgtagctggaatgttacagagttttgaaggcaaggctgtggcagcaattgcaggtggcttggtggatgctgaagccttggtagctctgaaagatttgcttaataaagttgactctgacaccttatgcactgaagagatcttccccaatgaaggagctggcacagatttacgttccaattatcttctcaataccacaattgccggtgtggaagaagcagatgttgttcttctagttggtacaaatccacgttttgaggcaccgctgtttaatgctagaatcagaaagagctggctgcataatgacttaaaagtggccctaataggcagtccagtagacctcacttacagatacgaccatctaggagactctcccaaaattctgcaagacattgcttcagggaatcatgaattcagcaaggtcttaaacgcagctaaaaaaccaatggtggttttaggcagttctgcactccagagagatgatggggcagcaattcttgcagctgtgtccagcattgcacaaaagattcgggtggcaagtggtgctgctgcagagtggaaagttatgaatattctgcataggattgcaagccaggtagctgctttggaccttggctataaacctggggtagaagcaattaggaagaacccacccaaactgctgtttcttctgggagcagatggaggttgtatcacccggcaggacttgccaaaggattgtttcattgtttatcaaggacatcatggtgatgttggtgctcccatagctgatgttattctcccaggggctgcttacacagaaaagtctgctacttacgtcaatactgagggcagagctcaacaaaccaaagtagcagtgacacctcctggcttggcaagagaagactggaaaatcataagagctctctctgagattgcaggtatcactctcccatatgatactctggatcaagtgagaaaccgtctcggagaagtctctcctaacctggttcgatatgatgatgttgaagaagctaattactttcaacaagcaagtgagcttgccaagctagtagaccaggaatttcttgctgacccactggttccacctcagctaactataaaagacttctatatgacagattcaattagcagagcctcacagacaatggccaagtgtgtcaaagccgtcacagaaggcgctcaggcagtagaggagccatccatatgctgacacatctatcagggaccctgttttgctacggacagtaaatggacattggtgtaacccttataagttaacgttttccaacatgagtctaaatgatgtaatatttaaagttagactatgcttatttgaaaatggtgttgcacttatcaaaaatcttggcagtttaaaatttatgtaagtgtgtgcaagcattaagtagtttaataaaactatcatttgttctttcatgttaaaaaaaaaaaaaaaaaaaaaaaaaaaaaaaaaaaaaaaaaaaaa

SEQ ID NO: 7 - DNA, 1150 bp, Rattus norvegicus
ccgctgtggtgcggagacccccgggtgaatccaccgacaccatgtctgaccaggaggcaaaaccttcaactgaggacttaggagataagaaagaaggagaatacattaaactcaaagttattggacaggacagcagtgagatccatttcaaagtgaaaatgacaacacatctcaagaagctcaaagaatcgtactgtcaaagacagggagttccaatgaattcactcaggtttctctttgaaggtcagagaattgctgataatcatactccaaaagaactgggaatggaggaagaagacgtgattgaagtttatcaggaacaaacggggggtcactcgacggtttagataattctttttattttttattttttccttttccctcaatccttttttatttttaaaaatagttcttttgtaatgtggtgttcaaaatgaaaattgaatactggcactccatctcttagaacatctggtaatctgaattctagtgttcaatattcattattggttgtttttgttgtgctgatttttggtgatcagacctcagctcccttaacattgcccttcttcctttaagagatttcatgtgtgcacacagagaggccaccctttccaggactgtgcattttcagggttgtgatgataaaaggatcgactaatgggagcttccctgtgacctttcaatggccctgcagttccggtatgtggttgcttcactcctggactatgattttcagtgggagatggagatttttcagagaaccgaactgtggaaaatgaccttttctcagcttgaagctacttttaaaatctgagggtctggaccaaaagaagaacatcatgtttgtagtcaaggtaacagatacagtgagagtaacagctaactccaaaagtggcttcactggagagaaagaaagtgtcttgagcaagacagtattgtcagaagatcccaggaaagttctaatcttcatcagcagttaataataaagttactcatacagaagtgtacgcaacagacactgctccttttgattctgttgtactttttggcctgggacatgggttttcaagggacatcatctgtaccagcttcattaaaataaacaatatttgtaaaaaccgtaaaaaaaaaaaaaaaaaaaaaaaaa

SEQ ID NO: 8 - DNA, 240 bp, Rattus norvegicus
  misc_feature (1)..(240): n = a or c or g or t
ctggaaccgcatgantcccaatgaccagtacaagttccttgctttttccaccgactacaagaagctgaagaaggaccggcctganttctaaggcgggggtggggggtgttccatctaaatcactcccttccaccccttgccccagaccctagggcatccgtntagcaacatggtcaagcttttgctttctgcttacanaggccanattcccacgaagaaggaaggcggctccaccnncac

SEQ ID NO: 9 - DNA, 660 bp, Rattus norvegicus
atggcctcagtaactgatggtaacactggaatcagagatgcctctgaccagaactttgactacatgttcaaactgctcatcattggcaacagcagcgtcgggaagacctccttccttttccgctatgctgatgacaccttcacccctgcctttgtcagcactgtgggtatcgacttcaaagtgaagacagtttaccgtcatgagaagcgtgtgaagctgcagatatgggacacggcagggcaagagcggtaccggaccatcaccacagcctactaccgcggggccatgggcttcattctcatgtatgacatcaccaacgaggagtccttcaacgctgtccaggactgggctactcagatcaagacctactcctgggacaacgcacaggtcattctcgtggggaataaatgtgatatggaagaggaaagggtgatcccgactgagaagggccggctcctagcagagcaacttgggtttgacttctttgaagccagtgccaaggagaacatcagtgtgaggcaggccttcgagcgtctggtggacgccatctgcgataagatgtctgactcaatggacacagacccctccgtgctgggcgcctccaagaccacacggctctcggacaccccgccgctgctccagcagaactgctcttgctag

SEQ ID NO: 10 - DNA, 4388 bp, Rattus norvegicus
gtccggcggccgagatagcgagtgagggagcgaacgagcagcgacccgagagtccagggagcgaggaggagccggaggggagcgctcaggcgcgagcgagaggacgcgcgaacgctgggctagggctcgagccccggaacggctgaggagcccgcccgcggccctcccctccccctccccgggaccgggcccagcgcgccatcctccccctccctccctccctccctccttcctcccttccctctccctccccctcccccgctggtggatgggagtgaaggacggaagaggccctgcggaggcggtggtgcagcgctccggtggaatgaaccttacttgttgactggttgctgattggattcacttgaaaaaagaatcatatttccttctgtggaagccacatagtggcatatttaattcaaatccagggatcacaacttttgatttttctggagggacataccactatatcaaataagcttgacattacagccaaaatggtgctgtcccagagacaacgagatgaactaaatcgagctatagcagattatcttcgttcaaatggctatgaagaggcatattccgtttttaaaaaggaagctgaactagatatgaatgaagaattagataagaagtatgctggtcttttggaaaaaaaatggacatctgttattagattacaaaaaaaggtaatggaattagaatcaaaactaaatgaagcaaaagaagaatttacgtcaggtggtcctcttggtcagaaacgagacccaaaagaatggattccccgtccacctgagaaatatgcattgagtggtcataggagtccagttactcgagtcattttccatcctgtgttcagtgttatggtctctgcttcagaggatgctacaattaaggtgtgggattatgagactggagattttgagcgaactctcaaggggcatacagattctgtacaggacatttcctttgaccacagtggcaaactcttggcttcctgttctgcagatatgacgattaaattatgggattttcagggttttgaatgcatcagaaccatgcacggccacgaccacaatgtctcttcagtagccatcatgcctaatggagatcatatagtgtctgcctcaagggataaaactataaaaatgtgggaagtgcaaactggctactgtgtgaagacattcacaggacacagagaatgggtacgtatggtgcggccaaatcaggacggcactctgatagccagctgttccaatgaccagactgtgcgtgtatgggttgtagcaacaaaggaatgcaaagctgagctccgagaacacgaacatgtggtagaatgcatttcctgggctccagaaagttcatattcttccatctctgaagcaacaggatctgagactaaaaaaagtggcaagcctggacccttcttgctatctggttccagagacaaaactattaagatgtgggacgtcagtactggcatgtgccttatgactctggtgggtcatgataattgggtacgtggagttctgttccattctggggggaagtttattttgagttgtgctgatgacaagaccctccgtgtatgggattacaagaacaagcgatgcatgaagaccctcaatgcgcatgaacactttgttacctccttggatttccataagacggcaccctatgtggttactggcagtgtagatcaaacagtaaaggtgtgggagtgccgttgattgagtcacatttggttcttcctcccttttttcctctggatgcactctgatgataccatggttaccccatttgagctctgtttaaataaatattgtcctttcatgtaaattattctggatgtagattgagcttattaaatgttacacacaaagtattcatgcatggtgaatccaaattgtatactgtaaatttacatatgttgtctagaagtaccataggggttaaaaacctgggctggcattggtcacaccaggcctacaagggcagaagttgaataaattgaactagggcactaaactgaatagttgacagtgtcattttatgttggattattaattattgtttttcttcctgctatctgttggtgcctgacttgatggcctcattttggggaaagtggttattagggctttttctgaaatgtgtatctatgtaacatcacgtaagtgtgcttaatgaatctttaagggggttagatggtaagactacagttcagagtctcttgctccatctgtgtaatggggattacacattgaagtttttgtcatgacccctttgccaaatcaataggatatgtttgttttggcacctatcaagcgaaggctagtggtttatttctgtaagaaaatgatcgtaaatctcaagaaaaatctcagcagctaactagtgaatcctttttcatttgggtctcactgctctgtaaacaggtcaggagacactgtcctactctgagcttctcttctccacactagacacacaagtcgtgttctccatactgttggactgtatagtgatatgactccccagtagactttgatcttcccattgagtgtcatggtacaaatcactatgtgtttatgatgtttttagggatgtgcaatgtgcatgtcagaaggacaaagaggacaaagctgcgtgcacattttaaaggtgtggaagaaacagtttccaacatgaacctggtaacaatttggactgtttcacttacaagttataaaaaaagtgacagggtttattgaagcgtgcatagaaatataccggttttctcttcatcttttgtttatatgtaaatgtttataagtatatgggcctatctgtaagtggatatgtctatatatgtatatcacacacatacaacctccatgttgttgggttttgagtttctgaggacgtgctaaaaaataagcctagagtgactcttgctggggaaataaataccaaccacagccatgctttagaataaactctgtgatgcttctgactctaaggggcttttctaagctgagagaaagtcactttattctcccctctaatgggccattcaccattttacacattcctgataggctgtatattttggtccagagttactacagtaggtttaagagaatttttggaacactattccattgtcaattgttaataaagaatttatcgcctaggtaaccaactttttttttctttttaagaaaatcaatttgaaaagttaacagcaacagtgacatacataacaatgacagtctaacaatggtaattcttttctggactgtattttattcgtttgtataatagaggatttttttaaaatgtccctttaagtattgaatggaaatttgattcctgaaaggacaaagggtgagaattaatgtcctgtagataaacacaagagattaggctgtagcagcagcagcttactgtctagcctgtgtccttttcgtttgttcacctgtttggtcttaatattcctcagatttctctagaaaggaaaagtgttttgagaagtaagtggctatttttgaggacaaaactccatcatgattccgtaaacactgtaggttagcttttaggacaacattgcctcacagccttgcttacattgagaagtctttttctcctagccgttctgactggatttttctccaaaagctatggaaaatatctttgttctcatttgctgctatttcctgtcctatttcaagaatataaatacatagaaatggtgcatcttaacatttgtttgtatgtgttaaaatgtcttgtcttttaattcagttttagcatgtagcaacatgaattgtttaagggtaagccacaacatctagacatcattcatagaaacaataaagaatggtaccaatgtagaggagcaacctgggtttcctcccctgaagcagtgactctgacaacggaggagggagtgctctgtaacaaagctgtcctcacttgggagattgccacagcctgctgcttagctgagttaccagacatcctccacctaagcagcagcaaacattgaatctcagggatggtccacagctggatccaaacataacgagccctgtttgaataatgaagggtggcggggcaacatccacatctggcatcggatttgcaaaggtttcttgcactgttgtttgacactgccctgttgatgcccttactcttacgttactgttttctctgtctgctgtctaaccctgtgccttgcctgggataaggacaatgataaagttactggttttggttgtaagtagaggactttatcaattggttagcggttcactgctgctttgttactttcttgagtcagattggctgcttattaagaaataaaaagctgatagaattgtgtaaaaaaaaaaaaaaaaaaaaaaaaa

SEQ ID NO: 11 - DNA, 507 bp, Rattus norvegicus
  misc_feature (1)..(507): n = a or c or g or t
gaaggcacaaaaggggagtcgtgctgataagtacgactgcactagacaccggcgttgtcaccgacctcgtgacagggaaagttctcgaccaggaacgtgacgatccgtctaccggcgaatgagtagagcatcaactattcagcnggagggacttactcgactcgctgaagcaaacagtgtaccgtgcgtttgtcttcggtcaaagccccaacatggaacatccgtttagagtacttacagtctcttatcgttgtctcccgctttcagtaggcgggtgactattagagacctctaaagaagtacagtaactatngtcgttacccctctggggtcaaccgttnacccggggtcttcacgcatgagtactctatcagggccttcaggaacgaggcctgtatcaggcgacgaaacgcgtggtctcgaggtcggtaccggcacgacaaccgccacttcggcgaaggatttgcctactgtggtcccagctgggccggtcgactcgagcacggc

SEQ ID NO: 12 - DNA, 443 bp, Rattus norvegicus
agttcacggatgcagttgtgtcgtggctgaatcagaacctgaatggccttgtcttcctcctctggggctcctatgctcagaagaagggcagtgccatcgacaggaagcgtcaccatgtcctgcagacagctcatccctccccgctgtcggtgtacagagggttctttggatgtagacatttttctaaagccaatgaactgctccagaggtctggcaagaaacccatcagctggaaggaactgtgaccctgcgggcagtgtctgtctacagcaggctttccagtgctgctgctgaagcattcgcccttagagcgtcactgaaaaggccctgttcttcagttccctgtgggagcggagaagagaaacagataggtctctctagaagcaccatgagcccgcaggacacagaaactgtggcttaaccaggcagaaccctccaggccc

SEQ ID NO: 13 - DNA, 1332 bp, Rattus norvegicus
ggggggcgtcgccggagtgaattgatccgggagttgaagagggctccaaaggtgggaagtgaagtccgtgcctcagttactggttgctgttcttttttgtgccccattctttatcgtatacacatacagaaggggagaaattgggcagtgaatgacgcttcctctgcattctagcgttgcttttcctgctctcgctggcctgtgactgaggatgacaatggaagagatgaagactgaagctgaggccgcgtccatggtttccatgcctctctacgcagtcatgtaccctgtgtttaacgagctagaacgagtaaatttgtctgcagctcagactctgagagccgctttcattaaggctgaaaaggaaaatccaggcctcacacaagacatcattatgaaaatcttagagaaaaaaagtgtagaagttaacttcactgagtcccttcttcgtatggcagctgatgacgtagaagagtacatgattgaacgaccagagccagaattccaggacctaaatgaaaaggcacgggcacttaaacagattctcagtaagattccagacgagatcaatgacagagtgaggtttctgcagacaatcaaggatatagctagtgcaataaaagaactacttgatacagtgaataatgtctttaaaaaatatcaataccagaaccgcagggcacttgaacaccaaaagaaagaatttgtaaaatactccaaaagtttcagtgacactctgaagacatattttaaagatggcaaggcaataaatgtgttcataagtgccaaccggctaattcatcaaaccaacttgatacttcagaccttcaaaactgtggcctgaagctgtatatgttcagagatgtacttctcagtggcagtattaaactgcacttatctgtaaatttaaagtctgactgtataaattaccagccctcctgaggggtctaatccaggatgttgaatgggattatcgccatcttacaccgtatttttgtaaaatgtagcttaatcataacctcacactgaagattttgcatcacttttgctattatcattcttttaagaattataagccaaaagaatttacgccttaatgtgtcattatataacattccttacaagaaatgtaaatattggtgtttgtttctgacattttaacttgaaagcgatatgctgcaagataatgtatttaacaatatttggtggcaaatattcaataaatagtttacatctgttaaacattaaaaaaaaaaaaaaaaaaaaaaaaaaaaaaaaaaaaaaaaaaaaaaaaaaaaaaagaaaaaaaaaaaaaaaaaaaaaaaaaaaaaa

SEQ ID NO: 14 - DNA, 5918 bp, Rattus norvegicus
gaattccagcacttgggtgtcaaggctggaggagcaagagtttaaggctagcctgggctacatgagcccctattttgaaaaagaaaacaagaaataaaaaagttagaaaaaagaaaaaatgaaaacaaaagatgtgtgcgtgtgtatgtgtgtgagagagagagacagtctctctctctctctctctctctctctctctctctctctctctctctctctctgtgtatgtgtgtgtgtgagacaattactccctgctgtggactgttacctcagaactaagactctaatgcaatctattctttttttaaaaaacaggctcggggctggggatttagctcagtggtagagcgcttacctaggaagcgcaaggccctgggttcggtccccagctccgaaaaaaagaaccaaaaaaaaaaaaaaaccaaaaacaaaaaaaaaaaacaaaaaaaaacaaaacaaaacaggctctaatgtagattgggctagcctcaaactcttcatcctcctgcctccccctccaaagcatgaggactacagaggtgggccaccatacccagtaacctcatactgtttcaagacatctaactagggggtctttaattcgtacacggaaggaggagcccggaagaagaaaaagggacatcactgacagctaaacatatttataatgagaggaggtaggggacagacaagggacggaaaggtgatgtctaggacaaaaagctaaccacataaactagtaggtgggtcccgacacctctgcttagggtctcacccaaaagtcggagttaacagcactgtgaggccagatgctatcagaggacaggacacaccatctctccacctaggaaaggtgaactgacaggggcagcagacacagaagaatcagcaaactcttaagtcaaccctgaggttactacagcacagaatagaacagtgcctggcaaggagcagctgtgtgaaggagaagccaagcagccatcctcagcattcttcttctattaatcttttgggacagggtctgcctctgtaacctaggctgaccttgactcgctgcagtccctctgccccaccctctaccgaaagtttttttttttctcctttctaatgccaggctgccgcctgaggcaaagggagcggcttgcagcctggcacggtcggtcgattaaaccttgctctccccgtcctgggacactttccttttttgggtcacaggtcctcctaacatgagaaccgagtgtttacacaatgatgttcttttgaaaaccgtgaaaactccacaggcgatgtacttgtacgttaagcgtgacataaagacagcaaagcgaataaactatactgcaagatctcttctctttccctatttaaacctaaaatggagggagtggggggcagacacagacaggcgagcattccacaggcgccccccccacgctgtcacttccaggcaggacccaatcacagacttcttagccaagcgttatccctcccgttttgagaaactttctgcgtccgccatcctgtaggaagaatttgtacaccttaaactccctccctggtctgattcccaaatgtctctcaccgcccagcactttcaggagctgacccttctcagcttcacatacagagaccgctaccttgcgtcgccatggcaacactgtcacaaccggaacaagcacttcctaccaccccccgcctcaggaatccaatctgtccagcgaagcccagatccgtctggagagttctggacaagggcggtaccctcaacatggattactcatgggaggcggagaagctctaacagacccgaaactgctggaagattcctggccccaaggcctcctcccgctcgctgattggcccatgggagggtgggcggggccggaggaggctccttaaaggcgcagggcggcgcgcaggacaccagattcctcctcctaatctgacagaaccagtttctggttccactcgcagagaagcagagaagcggagcaagcggcgcgttccagaacctcgggcaagaccagcctctcccagagcatccccaccgcgaagcgcaaccttctccagagcatcccccagcggagcgcacccttccccagagcatccccgccgccaagcgcaaccttccagaagcagagagcggcgacatggccaagaaaacagcgatcggcatcgacctgggcaccacctactcgtgcgtgggcgtgttccagcacggcaaggtggagatcatcgccaacgaccagggcaaccgcacgacccccagctacgtggccttcaccgacaccgagcggctcatcggggacgccgccaagaaccaggtggcgctgaacccgcagaacaccgtgttcgacgcgaagcggctgatcggccgcaagttcggcgacccggtggtgcagtcggacatgaagcactggcccttccaggtggtgaacgacggcgacaagcccaaggtgcaggtgaactacaagggcgagaaccggtcgttctacccggaggagatctcgtccatggtgctgaccaagatgaaggagatcgccgaggcgtacctgggccacccggtgaccaacgcggtgatcaccgtgcccgcctacttcaacgactcgcagcggcaggccaccaaggacgcgggcgtgatcgcgggtctgaacgtgctgcggatcatcaacgagcccacggcggccgccatcgcctacgggctggaccggaccggcaagggcgagcgcaacgtgctcatcttcgacctggggggcggcacgttcgacgtgtccatcctgacgatcgacgacggcatcttcgaggtgaaggccacggcgggcgacacgcacctgggcggggaggacttcgacaaccggctggtgagccacttcgtggaggagttcaagaggaagcacaagaaggacatcagccagaacaagcgcgcggtgcggcgactgcgcacggcgtgcgagagggccaagaggacgctgtcgtccagcacccaggccagcctggagatcgactctctgttcgagggcatcgacttctacacgtccatcacgcgggcgcggttcgaggagctgtgctcggacctgttccgcggcacgctggagcccgtggagaaggccctgcgcgacgccaagctggacaaggcgcagatccacgacctggtgctggtgggcggctcgacgcgcatccccaaggtgcagaagctgctgcaggacttcttcaacgggcgcgacctgaacaagagcatcaatccggacgaggcggtggcctacggggcggcggtgcaggcggccatcctgatgggggacaagtcggagaacgtgcaggacctgctgctgctggacgtggcgccgctgtcgctgggtctggagaccgcgggcggcgtgatgacggcgctcatcaagcgcaactccaccatccccaccaagcagacgcagaccttcaccacctactcggacaaccagcccggggtgctgatccaggtgtacgagggcgagagggccatgacgcgcgacaacaacctgctggggcgcttcgagttgagcggcatcccgccggctcccaggggcgtgccccagatcgaggtgaccttcgacatcgacgccaacggcatcctgaacgtcacggccactgacaagagcaccggcaaggccaacaagatcaccatcaccaacgacaagggccgcctgagcaaggaggagatcgagcgcatggtgcaggaggccgagcgctacaaggcggaggacgaggtgcagcgcgagagggtggctgccaagaatgcgctcgagtcctatgccttcaacatgaagagcgccgtggaggacgagggtctcaagggcaagatcagcgaggctgacaagaagaaggtgctggacaagtgccaggaggtcatctcctggctggactctaacacgctggctgagaaagaggagttcgtgcacaagcgggaggagctggagcgggtgtgcaacccgatcatcagcgggctgtatcagggtgcgggtgctcccggggctgggggcttcggggcccaggcgcccaagggaggctctgggtcggggcccaccatcgaggaggtggattagaggcttttctggctctcagggtgttggctagagacagactcttgatggctgctggtgcacgattcttatcaagttactccttctctccggagttcagtttaaagttacagccttttatacggtaattgatttgagtttgttacattttgtatgctcgtgggttttttatatattcaaattaaggttgcatgttctttgcgtttaatctaagtagctgtgtaaaaatggtgtttccttcctgcgaacacctcagcactgccaccctgtgtacagttttttccttgcatccctacaaactgagaaaaaaagttatcttttgtaacttaaacattcaaaataaaatgttacaagtatgttttgtccgtgtgtatgttgggagggctaatggattctgggttcatgtggatttcttagctttgcgatgacggggaaatggggtttgggtactttggttagaagtgtgggttttggggttggggattgagctcagtggtagagcgcttgcctaggaagcgcaaggccctgggttcggtccccagctccgaaaaaagaaccaaaaaaaaaaaaagtgtgggttttcagcgcagttatgcagaaaatgcaggtattcggtttgagggtaggactcattggggggaacagtagggtggtgctgtagttgggggtcagtggaagagggactcttagggctatgatgactcagttctcttagccctccagggctgaaccagaactgtttcccaacttatgggtcgagacctctgttggagtcagacgacctttccacagtggtagcctcggacattgaaaattgcaggggttgttggttgtcggttgggtttttgttttgtcttgttttgtttttcaagacagggtctctctgtgtagccctggctggcctcgatttcggatccacatgcctttcccaaacctggcttccttattacttttttttttttttttaagatttatttacttattatatataagtacaatgtagctgtcttcagagacaccagaagagggcatcagatcccattacagatggctgtgagccaccatgtggttgctgggatttgaactcaggacctcttcaagagcagtcagtgctcttaacttctgagccctctctccagccctttattacttttagagatttcttaccaggttgccctggctgtacttacactttctctttagctctgctgagctttcaattcaccagttccagaccacacccctgaacccaccagctgaagacaacatgtcttgctatctttttctttcctttttggggcagggatggtctgtgtgttgtgtgtgtgagagacagaggcagagacatccttcccatgtagccctaactgagtcggaagtcattatttagaccaggctgccctgactcctgtatctgcctctccaatggattatgggcacctgccacctcacccactcactttatccccaggatccccctccctcttcccaggcagtaggtctggtgatggagaagaccacttaccatgtccatggctcaaagaagcaggcagaacgtaggggaaagagttgctttcacctcaagcctttggatccatgggtgttcattctagtggggtaatgccatcctttgagagctggggggtgtgggtcaacagagatcggttgctatgtgtgcatgaggcccgcaattcagtccctggctccatggagaacgaaccaatcagttgggtgaggtgtaaaccacatgtaattttagcatgtccaaacagacacgttaaggacatcctagggtaaagaagtcttcagcaatagtttaattgaggcaattatgctcatgaattc

SEQ ID NO: 15 - DNA, 451 bp, Rattus norvegicus
cggccgcgttctacgtcaggagccgctgtcgcttcgctcgacctcccgagcgaaatggtctctcaagtcccggccaccgggcctccgcgctccccatgaagggtcggaggccgcgcggggagtagcagcggtctgcaggcgagcggagacggacacaccggggacctctccgaccaccgtgcttctgctgcgcgcctccaggccaatgtgcaataccaacatgtctgtgtctaccgagggtgctgcaggcacctcacagattccagcgtcggaacaagagactctggttagaccaaaaccattgcttttgaagttgttaaagtctgttggagcacaaaaagatatttacactatgaaagagattatattttatattggacagtatattatgactaaaagattatatgatgagaagcagcagcacattgtgtattgctcaaatgatctccta

SEQ ID NO: 16 - DNA, 1468 bp, Rattus norvegicus
cgcccgggcaggtgtaccatggcggtctctctcctgctgcggggaggacgaatccgggcgctgaaggctgcccttctcgaggcaaaggtgttccgaggagaactggcttctacagtgcccctgtctacagagtccgagaataataaaaaggcggcaggaccaactagcaagacggaaagtgtgttcaaagatgtggtgggagcagaggagagggccaagctcctagacactcacacagcagcggcactgtccaaaagctcccctccacccagttcttacccatcagtggagaacacaggtggggctgtcgcaggcctgccgctcacagacttgtcaagaaagactttggtagcgtttcctcagaaagttacgcctccaccgcatgcctgggcttctgactcggaggctcggcggcatgtccagaaagtgacgaaagattcatcttcatcttcctcatccagctcctcagattcagactctgatggggaggaacatggctccgacattggtccccgagtggcaagcaaaagcaaggcagggttttccaaacctgaggcttctcgtccctcgaagaacggagcccctaagatcacagtttttgcaaaagagaaggccaaggtgcagaagccacacacagatgtcacctacccagagaagcccctgcagcctaagaagaaagggactttcaccaagcctgtagaagatagtaaagaaatcaggtccaagctcatgacatccaagccacagtccagtgaggttttggagcaaaaaatgaaggaaaaacagcaccagggaaaacggagaccagacaagacaggaaaggaaagcacagagctgtttgaagctgaaggaattttacccggccacaggaaagccagagtttccacacagcccacaaccggaacacaagaggccagcgcagaactccggccagccgctgcccccgagtcgggagctagacaggaagccaaagggccagagctcgaatggaagaccgcttctcccctggtcagaaaagaaagcctggagaagcaggtgccagaagggagcttccaggcggaggaggagacctcaggagatcagacactagggagatattcgaagacagttcctgttgaggagaaaaatacctttggagagagagctggaccacaactggaggggacgttccaggcgccagccggcgaagccccgcccactgatgcaggcccaccccaggaagccccaggcgacacacaggagcccacactggttcccgagtcgagtgacaccaccacctacaagaacctgcagcatcatgagtacaacgcattcaccttcctagacctgaacctggacctctccaagttcaggctgccacagccgtcttcgggacgagagtcgccccggcactgaactcaactcagggtagacccccgtgtggtcccttgaattcttgcctgtgagaataaaagtcagaggcacaaat

SEQ ID NO: 17 - DNA, 2152 bp, Rattus norvegicus
ctcttcaattccaactagaatgctgtggcaggcacttcgaagatttggtcaaaagctggtgcggagacgtttgctggagctgggcatgggtgaaacccgccttgccagatgcctgagcactctcgacttagtggccctgggtgtgggcagcacattaggtgcaggtgtgtatgtcctggctggtgaggtggccaaagagaaagcaggaccatccattgtgatctgctttttggtggctgctctgtcctctgtgttggctggactgtgttatgctgagtttggtgcccgggtccccggctctggttctgcatacctctacagttatgtcaccgtaggtgaactctgggccttcaccaccggctggaatctcattctctcctacgtcattggtacagccagtgtggcccgggcttggagctctgcttttgacaacctgattggaaaccacatctctcagactctgaaggggaccatcttactgaacatgcctcatgttcttgcagaatatccagatttctttgccttggcccttgtgttgctgctcactggattgctggttttgggggctaatgaatccggcctggttaccaaagtgttcacagggatgaaccttttggttctcgggtttgtcatcatctctggcttcattaagggagagctgagaaactggaagctcacgaaagaggactattgcttgactatgagtgaatccaatggcacttgtagcttggattctatgggctctggaggtttcatgccttttggcttggaagggattctccgtggcgctgctacctgtttctatgccttcgttggttttgactgtattgcgaccactggggaagaggctcagaatccccagcgctccatccctatgggtattgtgatctcactgtccatctgctttttggcttattttggtgtgtcatcagcactgacgctcatgatgccttactacaagcttcagcctgagagccctctgcctgaagcttttacctatgttggctgggagcctgcccgctacctggtggctattggctccctctgtgcactttctactagccttttgggctctatgtttcctatgcctcgggtgatctatgcgatggcagaagatggccttctgttccgtgtccttgctagggtccacaatggcacacatacacccattgtggccactgtggtatctggtgttattgcagcattcatggcattcctctttgaactcactgatctcgtggacctcatgtcaatcgggactctgctcgcttactccctggtgtcaatttgtgttcttatcctcagatatcagcctgaccaagaaatgaagaacggtgaagaggaagtggaattgcaagaggagaggacactcgaagcagaaaagctgactgtccaggctctattttgccaagtcgactccatccccacactcctttctggccgaattgtctatgtttgctcatcactgcttgctgtactactaactgttctttgcctggtgctgacctggtggacaactccgcttcattctggagacccagtgtgggtcacagtggttgtgctgatcctggggctgatccttggaatttctggggtcatctggagacaaccacagaaccgcactccccttcattttaaggtgcccgttgttcctctactcccactggtgagcatctttgtgaatgtttacctgatgatgcaaatgacagctgacacttgggcccgatttggggtctggatgctgattggatttgctatctacttcggctatgggatccaacacagcgtggaagaagttaagaatcatcaaactctacccaagacaaggccccaaactatagaccttgatctcaccacttcttgtgttcatagtatttgatgtaactatacccaagtgttgtcttgttctcctacacaataatggagagtactcttgaccccacgaagagctgggcctctcatgtgatgttagtgatggatatgaagtagagctctgtatttcttgcgaaatgatggctaattctttgctgttactttgtttttaacttgtccactttgaaatagtctctgtagttgtttcctggctttgaaaaatgttattaaaagaaaattgggaaaaaaaaaaaaaaaaaaaaaaaaaaaaaaaaaaaaa

SEQ ID NO: 18 - DNA, 4514 bp, Rattus norvegicus
tgaagtttgtggagcgctttctcaccggctggtccgggacgatagccggcgcctcgctcttcggtgaccgccccattctctcgggattccttctctgtggtgacggacgctctagacgctcggtaagggaagctgaggctggcggcgggagttcagaggaggagcgcggagaggttgctcgctgacagcggcgcggctggacgcggacggcgtcgggctctggccggctgagagcttcgcccaccttccccgcggcctgtgcgcaggcgatgctgcggccccgaggcgcggcgcggcgagcagggagggcgcctccgagagcctagagctggtttccgtcctcttccccggggcaagtgggcatggaacagtgagagcccctcgctcggcgaggccgcgcgcggaggctccccatggccgggacgtacagctccacattgaagactctggaggacttgaccttggactccgggtatggggccggcgactcctgccgctcgctcagcctttcgtcttccaagtccaactcgcaggcgctcaactcttcggcgccgcagcaccgcggggcggcctggtggtgctactccggctccatgaacagccgccacaacagctgggacaccgtgaacacagtgctgcccgaggatcccgaagtggccgacctcttctcgcgctgcccgcggctcccggagctagaggagttcccttggaccgagggagacgtggctcgggtgctccgcaaaagcgtcggcggccggaggctgccctcattctccgccgaggctgtgaggcgcttggccggactcctccgccgggcgctcatccgcgtggcccgggaggcgcagcgcctaagcgtgctgcacgccaagtgtacccgcttcgaggtgcagagtgcggtgcgcctggtgcacagctgggcgctggccgagagctgcgcgctggcagcggtcaaggcgttgtccctctatagcatgagcgctggcgatgggctgcgccgcggcaagtcggcacgctgcggcctcactttctccgtgggccgtttcttccgttggatggtggacactcgcatctccgtgcgcatccatgagtatgcggccatctcgcttacggcttgcatggagaacttggtggaggagatccgggctagggtcctggcgagtcagagccctgatggcggaggggcaggaggcggagaggtatccgctgaggccttggagatggtcatcaacaacgatgccgagctctggggagtcctgcaaccctatgagcatctcatctgcggcaagaacgccaatggtgtcctctccctccctgcctacttcagtccctacaatggtgggtccctgggccatgatgagcgagcagatgcctatgctcagctggagcttcggacactggagcagtcactcctggctacctgtgtgggcagcatctccgagctgagtgatctggtctctcgagccatgcaccacatgcaggggcgccaccctctgtgcccaggcaccagccctgctcgccaggcccgccagccaccacagcccatcacatggtcccccgatgctctccatacactctactacttcctgagatgtccacagatggagtccatggagaaccccaacctggatcccccaagaatgaccctgaataatgaacggcccttcatgctgctgccaccactgatggagtggatgcgggtggcaatcacctatgcagaacaccgtcgcagcctcactgtggacagtggcgatatccggcaggcagcccggctgctgctaccaggcctggactgcgagccccgccagctcaaacccgagtgctgcttcagttccttccggaggctggacgctcgagctgctactgaacgcttcaaccaggacctgggcttccgcatgctcaactgtgggagaacagacctcatcagccagccatcgagccctgggccagacggggtgaacacaatggatgaccagggtctgacaccgctaatgtacgcctgtgctactggggatgaagccatggtccagatgctcatcgatgctggagcaaacttggatatccaggtcccaagcaactctcccaggcatccttctgtccatccagacagcaggcactggacctccctgacattcgcggtgctgcacggacacatctctgtagtgcagctgctacttgatgctggtgcccatgtggagggctcggccgtgaacagtggggaggacagctatgccgagacaccccttcagctggcctctgcagccgggaactatgagctggtgagcttgctactgagccgaggtgccgaccccctcctcagcatgctggaagccaatggcatggcttcttccctccatgaggatatgaactgcttcagccactcagctgcccatggccacaggaatgtcttgaggaagctcctgactcagccacagcaggctaaagcagatgtgctgtccctagaagagatcttggctgagggcgtggaggaaagcgacacatcgagccagggcagtagcgaggggcctgtgaggttaagccggacccgaacgaaggccctgcaggaagccatgtactacagtgctgaacacggctacgtggacatcacgatggagctgagggcactaggtgtcccctggaagctgcacatctggatagagtctctgcggacctctttctcacagtcacggtactcggtggtgcagggcctcctgagagatttcagctccatcaaggaggaggagtacaatgaggagctggtgacagaaggcttgcagctcatgtttgacatcctcaagaccagcaaaaatgactccgtcctccagcagctggccaccatcttcactcactgctatggcaccagccccatccccagcatcccggagatccggaagaccctgccagccaggctagatcctcactttctgaacaacaaggagatgtctgatgtaaccttcctcgtggaaggaaagctgttttatgcacacaaagtccttttggtgacagcatctaacaggttcaaaaccttaatgaccaataagtcagagcaagatggggacaacagcaaaaccattgagatcagcgacatcaagtaccacatctttcagatgctgatgcagtacctgtactatggaggaacagagtccatggagatccccacggctgacatcctgcagctcctgtcagctgccaacctgttccagctagatgccctgcagagacactgtgagatcctgtgctcccagacccttagtgtggagagtgctgtcaacacctacaaatacgccaagatccacaacgccccagagctggccctcttctgtgaaggcttcttcctcaagcacatgaaggccctgctggagcagatgccttccggcagctcatctatggccgaagcagcaaagtccagggcctggacccactgcaggatctgcagagcaccctagctgagcgagtacattctgtctacgtcacctcccgggtgtgagccagggtggatggtgactgctatctgagggtgtacaaaggtctgttaaagccagaaaccaccagcgacacccccagtggagggaggcttgtaggccttctggggtaggctctcggggggtacgtcctgctcttcccctagattaccctctgtggtgttgactgatcctgaggtggaaggagagtccacttcactgttgctcggccagtaactggcaggggtgtgacgtaattgcaccctgagggctaccctgtgccctctcccctccagtggctcagcgtcgagccgatccacctcagcaccagccatcctggctggggatgttaggatcacaggcattcttatgaatgtagaaagtgtccgagcccaggccactgggtgcaggagccgctatgtttggtttcctaacagagagaggctaagtcctgccctccaagctgtgcctttgaaagggctgggccctgttggtgaaaaccagacctccagtgccctccctacaagactactaacgagagtctgaactgggaatccctgagcaccgggtatgctgggctacaggagctggcagccacaggaggcccagccccatcatgtctgtaggctgaggcagcagggcttcaatggcctcaagtgcagggcgccttccactcagggctggggtgcaagagcacacttctcacctgggttccgtgactctggggcatgaacggacagggccttggtggaagagaagctgtgtcctctcccctcctgtcctcagtcttggctccccatcctctgacctgtttgtggacagacgctgggacacgatcaagaacagctaccttagaaactatttattcatcagaagcccccagggcttgcaatcctggaacaatattttcaacttgctgcttgtgctggatgtacaaaagaatgaatggtattttattgctgtaatattgtatgatactgtaactataccttaatgttgttacttactgtaaatgtactatggttttatcaacaataaacactcattaacattgac

SEQ ID NO: 19 - DNA, 1947 bp, Rattus norvegicus
gtgggtgtctgtggtgacagacaggagcctccatcatggcctggggttgttttgtggtcctgcttctgctggtggcagctcccctgagattgggtcagcatctgcatctcaagcctggctttcaatacagctatgactgtggggtacagggcatgcagctgctggtgttccccaggccaaaccagactatccaattcaaggtgctggatgaatttgggaaccggtttgaggtgaataactgctctatctgctaccactgggtgatcagtgaggcccagaagcccgcagtgttctcagctgattacaaaggttgccacgtgctggagaagcaggatgggcgtttccacctgagggtgttcatacaagctgtactacccaatggccgtgtggatacagcacaagatgtcactctgatctgtcccaaaccagaccacatcttgactccagagtcctacctggcaccacccaccacacctcagccttttatacctcatacttttgcccttcaccccatctctggccacaccttggctgggtctggccacactggtctcactacattgtacccagagacccatccaactcccgctccaccatcctcagaacctggacctgttggacccaccgtgcctcagtcccagtggggcaccttggggtcctgggaattgactgagcttgattctataggtacccatctgctccaggagcggtgtcaggtagcctctgggcacatcccctgcatggtaaaaggtagttccgaggaagcctgtcagcaggctggctgctgctatgacaataccaaagaaatgccctgttactatggcaacacagtcactctccagtgtttcagaagtggctactttaccttggtcatgtcgcaagaaacagccttgacacacggggtcatgctggacaatgtccacctagcctatgcccccaacggatgcccccctacccagaagacaagtgcttttgtggttttccatgtccctctcaccctctgtggaacagcaatccaggtggttggtaagcagctcgtctatgagaaccagctggtgtctaacatagaggtccaaacgggaccgcagggttccatcactcgggatggtgtcttccggcttcatgttcgctgtatcttcaatgctagtgatttcctgcccatccgggcatctatcttctcaccacaaccacctgcccctgtgacccggtctggacccctgaggctggagctgaggattgccacggataagactttcagctcctactaccaggggagtgactatccccttgtgagactgctccaggaaccagtttacatagaggtccgtctcctgcagagaactgatcctggtctggctctcatgcttcatcagtgctgggccacaccctctgccagcccctttgagcagccccaatggcccattctgtcagatgggtgtcctttcaagggtgacaactacagaacacaaatggtggctgcagacagggcaacgctgcccttctggtctcactatcagcgcttcaccattgccaccttcactctccttgactccagctcccagaatgcccttcggggacaggtctatttcttctgtagtgcctctgcctgccaccctgtggggtccgagacgtgctctaccacatgtgattctgagatagcaaggcatcgacgatcctctggtcaccacaatagcactatccgggccctggacattgtgagctctccaggagcagtgggctttgaggatgctcctaaactggagccttcaggttccaccaggaactccggttcaagacccttactctgggtgctccaactgctggccctcaccctagtcctgggggatggtgtcttggtgggtctgagctgggcctgggcctgggcctagaagttctgggaaggcaccggaaattaaatgggctcaataaaccattgtttgaaaactg

SEQ ID NO: 20 - DNA, 1350 bp, Rattus norvegicus
atgtggaacgcgacccccagcgaggagccggagcctaacgtcacgttggacctggattgggacgcttcccccggcaacgactcactgcctgacgaactgctgccgctgttccccgctccgctgctggcaggcgtcaccgccacctgcgtggcgctcttcgtggtgggcatctcaggcaacctgctcactatgctggtggtgtcccgcttccgcgagctgcgcaccaccaccaacctctacctgtccagcatggccttctcggatctgctcatcttcctgtgcatgccgctggacctcgtccgcctctggcagtaccggccctggaacttcggcgacctgctctgcaaactcttccagtttgtcagcgagagctgcacctacgccacggtcctcaccatcaccgcgctgagcgtcgagcgctacttcgccatctgcttccctctgcgggccaaggtggtggtcactaagggccgcgtgaagctggtcatccttgtcatctgggccgtggctttctgcagcgcggggcccatcttcgtgctggtgggcgtggagcacgaaaacggcacagatccccgggacaccaacgaatgccgcgccaccgagttcgctgtgcgctctgggctgctcaccgtcatggtgtgggtgtccagcgtcttcttctttctaccggtcttctgcctcactgtgctctacagtctcatcgggaggaagctatggcggagacgcggagatgcagcggtgggcgcctcgctccgggaccagaaccacaagcagacagtgaagatgcttgctgtggtggtgtttgctttcatcctctgctggctgcccttccacgtgggaagatacctcttttccaagtccttcgagcctggctctctggagatcgctcagatcagccagtactgcaacctggtgtcctttgtcctcttctacctcagcgctgccatcaaccccattctgtacaacatcatgtccaagaagtaccgggtggcagtgttcaaactgctaggatttgaatccttctcccagagaaagctttccactctgaaggatgagagttcccgggcctggacaaagtcgagcatcaacacatgacagcacatcccatctctccgccatcgctcattgctctacacccgaagccgtagccaagcgggacttgggaggaggcagaacctcagtttggggattagagacaaatgggtctggaaacaattgggggtggggagtagagccagatgggcagggtccacgcagattgatctgcttgtgcgcccaccagagcactcatgtgcaacccctgcacacccgtgattttattattggggctactggcagctttgcagctca

SEQ ID NO: 21 - DNA, 1686 bp, Rattus norvegicus
gttctagatcgcgagcggccaggagagatggatgcgaaggggaagccgcactttaactgagagcaaggtcaggagcgcgctaccccacgctccccgccgctgagaagttctttggacgcgaacagacgtgtgctgcagctgggcagagcgcggagccgagcagcgagctagcgagcgccgccgacccgcccgcccgcccgcccgcgccagccgggaggagaggcagttcgcgccccggggccccggctcggcccgcgccgccgccggccccgccatggcggaggtcgggggcgtctttgcctccttggactgggacctgcaaggcttctcctcctctctggggaacgtgcccttagctgactccccgggtttcctgaacgagcgcctgggccagatcgaggggaagctgcagcgcggctcgcccacagacttcgcccacctgaaggggatcctgcggcgccgccagctctactgccgcacgggcttccaccttgaaatcttccccaatggcacggtgcatggcacccgccacgaccacagccgcttcggaattctggaatttatcagcttggctgtggggctgatcagcatccggggagtagactctggcctatacctaggaatgaatgagcgaggagagctgtttggatcgaagaaactcacacgagaatgtgttttccgggaacagtttgaagaaaactggtacaacacctatgcatccaccttgtacaaacactcggactcggagagacagtattatgtggccctgaataaagacggctcaccccgggagggatacaggactaaacgacaccagaaattcactcactttttacccaggccagtagatccttctaagttgccctccatgtccagagacctcttccgctataggtaatggacccctggtgccacctctgtgacccatgtactctgtgaccatggttggctctgcaaacactatactcatagcttttcaacccttccttcctatcaattagataacagagaagcacttactgttcaacatgacccagctgtccccttgttcaaagtgtatatcaaggttgggttattctggggagggacgtggggggaggggttgttccgagggaatcttgtatatactttttgttttactcatgttctttcccgggaggtggcatgacaaagaacaagggttcccactaagggccaaagctgtcttgcctcacaatctacccagataccttgagatggggtacaaatgaaagaccaaggaatctgccacagatgctacctaaagagctttgggaaagtgtcatttggaaaatcctaggggctcccaccctgctgcaagccatccctaccctagctctgtagatctctcattcgtcctgacatgcagttttcctgccaccagaaagtgggagatatggggtaggttgtaaggaaatgatattaaaatgtaagcatggatactgtgcataaggacaaactatttatgaaatgtatatgctatttattttatatatttatttatttcaaaataattttatttttaatgagagatgctatgactggattttcttcagaaagaataaggtcctattgaaacaggaaaaatgagttattaaaggcttttatttggcaataaaattgtctttaattataaaaaaaaaaaaaaaaaaaaaaaaaaaaaaaaaa

SEQ ID NO: 22 - DNA, 4194 bp, Rattus norvegicus
tcggcgccccgccttctccggggagcgcccggcgggagcggccggaccccgggctcgcgcgggagacgacgcgccacaaactttgccttttattgttcctagccctttaagtgcaaggggctctgttgggctggaaaaatgtccttcttcaatttccgtaagatcttcaagttggggagcgagaagaagaagaaacagtacgaacacgtgaagagagacctgaaccccgaggagttttgggagattatcggagagctgggcgacggagcctttgggaaagtgtataaggcccagaataaggagaccaatgttttagctgctgcaaaggtgattgacaccaaatctgaagaagaacttgaagattatatggttgagattgacatattagcatcttgtgatcacccaaacatagtcaagcttctagatgccttctattatgagaacaatctttggatcctcattgaattttgtgcagggggagcagtagatgccgtgatgcttgaacttgagagaccattaactgagtcccaaattcaagtagtttgcaagcagacattagaggcgttgaattacctacatgacaataaaatcatccacagagatctaaaagctggcaatattctctttaccttagatggagacattaaattagcggattttggagtgtcagctaagaataccaggacaattcaaaggagggattcatttattggcacaccgtattggatggctcctgaagtcgtcatgtgtgagacatcgaaggacagaccctatgactacaaagcggacgtttggtccctgggaatcactttaatagaaatggctgagatagagccgcctcatcatgagctaaacccaatgcgagtgctgctgaaaatagcaaagtcggagccccccacactagcacagccatccagatggtcttcaaattttaaggactttctaaagaaatgcttggaaaagaatgtggatgcgcggtggaccacatcccagctgttacagcatccctttgttaccgttgattccaacaaaccagtccgagaattgattgctgaggcgaaggctgaagtaacagaagaagttgaagatggcaaagaggaagatgacgatgatgagacagagagtgctctgccaatacctgcgaataaacgcgcctcctctgacctcagcattgccagctctgaggaagataagctttcacaaaatgcttgtattttggaatctgtgtcagaaagaacagaacacaatacttctggggataaatttagcaacaaagttcttagtgagaagcctactcctgagggacctgagaagactgtggatgtggatgggcctgcaaatgatgttaacttagaaactgtggctgaaccaaatgaccaagcggtaggattccatgagaatgggagagagaagaaaagaccccaactggaaagtcaaccagatacagaagaccaacaaactgtggatgttaatttagtcggtgaaggaaatgacagcaatatagtaattttagaaacaaacactgattgtctgaaaccagaggaagacagaaatgaagaaaaccaagagataattgagaataaacttacacaatctgaagaaattaaagatatacatattcaaacaatggacttagtttctcaagaaactggagaaaaagaggcagattttcaggcaattgacaatgaagttgggtttacaaaggaagaaacccaagagaaattgggaaaagatgataaaactcacaaagttgtgatcagtgatataaccagtgaggtgggaacagacgagcctccaggtgatacccagaagtctgctgagcagagccaggatgcagagggtggggctggggaagaagccccggagcctgcccagacactaacagagaaggccactgagggccctgaggctcatggtgctgaggaagagcctcgtagtggagagagagtagaggataagcagctagagcagcagtctgcagtgtgtgaaggtgagggacaggtaaccagcacttcagagagcacacgggcaaccacggaggaaccagagactgacgaagttgaccaagtcagcgagtcaaatagcattgaggaactagagagacttggagttactggtgctgaggaacaggctctagggagcaaaggggaggctgctacggagctagatttggagagagaagaaaatgcacaggaactgccagttaaagcagagccccaagctcctgcagcatcgcaggccagcgaacctccccctgtcttaatacccagtattaatattcattcggaaaacacagaaaataaaggagaaatgggtgctttgccaaaacctgaaaccatactgccaccagagcctgaaaatggaaagggaaatgacacggactcagggactgggtccactgtggagaacagcagcagtgacctgaacttgtccatctctagcttcctgagcaaaaccaaggacagtggctcggtgtctctgcaggagacaagaagacagaagaaaacattgaagaaaacacgtaaatttattgttgatggagtagaagtgagtgtgacaacatcaaagatagttacagacagcgactctaaaaccgaggaattgaggtttctcaggcgtcaggaacttcgagagctaaggcttctccagaaggaagagcagaaagcccagcagcagctcaacgggaaattgcagcagcagcgcgagcagatcttcaggcgctttgagcaggagatgctgagtaagaagcgacaatatgaccaagaaattgagaatctagagaagcagcagaaacagacaattgaacgactagaacaagaacacacaaaccgcctgagagacgaagctaagcgcatcaaaggagagcaggagaaggagctgtccaaattccagaatatgctaagaaaccgaaagaaggaggaacaagaatttgttcagaagcaacagcaagagttagacggcgctctgaaaaagatcatccagcagcagaaggcagagttggccaatattgagagagagtgcttgaataacaagcagcagctcctgagagcccgagaagctgcaatttgggagcttgaagaacgacatttacaagaaaagcaccagctgcttaaacagcaacttaaagatcagtatttcatacagagacatcagctgcttaaacgccatgagaaggaaacagaacaaatgcagcgttacaatcaacgacttattgaagaattgaagaacagacagactcaggaacgagctagactgcccaagattcagagaagtgaagccaagacacgaatggccatgtttaaaaaaagtttgaggattaactcaacagctacaccagaccaggaccgtgaaaaaattaaacagtttgctgcacaggaagaaaagagacagaaaaatgagagaatggctcagcatcaaaaacatgagagtcagatgcgggaccttcagttgcagtgtgaagccaacgtccgagagctgcaccagctgcagaatgaaaaatgccacctgttggttgaacatgagactcagaaactgaaggagttagatgaggagcacagccaagagctcaaggagtggagagagaagctgaggcccaggaagaagacactggaggaagagtttgccaggaaacttcaggaacaggaagtgttctttaaaatgaccggggagtccgaatgcctcaacccctcagcgcagagccggggctgtttacaaacgtctcaccccagcagtaccagggcaccagcgtgggcaggatgaagcacatgagcaggaggccgggcttgtaatacctcctctggaacatcaccagcttctcagctttcaggtcagacatgtccagctttccgcccttctctttgacagccgggtgtttgcgcacaagcagccaacccacgtgagagaagaaaaagccacggcgggagttgtgagggtcggcgtgtgtctctgagaacttgtggtgggcgcggtgatcccggggcccattcgtacacatcgttctggaatgccatggtgttggcgatgatgagaaagagcctcaggggcagccgagccttgtaagtcctgtggctccacaggcgatgagccccggctgtgatgcccagggcgctgattacgtagtacaaatatgcaaagaggcaggtgtagaccttgcaggaggggaccagtgtgatcccgtacagggctccaatgtgc

SEQ ID NO: 23 - DNA, 1542 bp, Rattus norvegicus
ggcgaggggaaccaagctgtccccggggccggctgcggtgggtcgggaccggagtgcatgagactgactgcatctcatgatgctaccgggcccgtgcatggctcaccccgtctctgctgcagcagctggttagggccgctctcgcagctcccagcgctcttaacagctctgcccacaggtctctgcggctcaccatgcccctcagcctcttccggcgcctccttctggcggtcctactactggtgatcatctggacactgtttggaccatcgggtttgggggaggagctgctgagcctgtccctggcgtcccttctgccagccccagcctcgccaggaccacccctggccctgccccgcctcttgattcctaacccccaggcctgtggtggctccggaccccctcctttcttgctcatcctggtgtgtacggccccggagcacctgaaccagagaaacgccattcggggatcttggggcgccattcgcgaggcccgcggtttcagggtgcagacgctcttcctcctgggagaacctatgggacagcagtttgctgacctggcctcagagtcagcagcacagggggatgtcttgcaggcctccttccaggattcctaccgcaacctcaccctcaagaccctcaccggactgaactgggtgaacaaatactgtcctatggcccggtacatcctcaagacagatgatgacgtgtatgtcaatgtcccagagctggtgtcagaactgatacagagaggggggccttcagagcaatggcagaagggcaaagagccacaggaagagacaacagctgtccacaaagagcacaaaggccaggcagtgccccttctgtatttaggccgggtgcactggagggtgaggcccactcgaacaccagagtcccggcatcacgtgtcagaagaactgtggccagaaaactggggtcctttcccaccctacgcctctggcacggggtatgtattgtctatctctgctgtgcagctcattctgaaggtggccagccgggccccatatctacctctggaggatgtctttgtgggagtaagcgcaaggcgagtgggccttgcccccacacactgtgtcaagttggctggtgctacccactacccactggataggtgctgttacgggaagttcctgctgacgtcccacaaggtggatccttggaaaatgcaggaagcctggaagctggtgagaggactgaatgggagaaggactgagcccttttgttcctggctccagggatttctgggtaccttgaggtgccggttcatagcctggctcaatagttgagagcctggggccacagaaaacaagacagcacctcaggaacttttgccccaaaatcagtgcccaggctgcagctccccgtggtgatctatttccccacagcagactctgaagctgctactgaccaaggatagatagggggcttggggcctggcctgccatctccaaagaccagggagggacgaagcacagggtgtggggaagactcaagagcccaataaacacgtctctctac

SEQ ID NO: 24 - DNA, 1619 bp, Rattus norvegicus
cgttgttgttgtggtcgcttcgccgaagtctgcggctcaaagagccggctccgtcgcttcccgccgccatgaagtggatgtttaaggaggaccactcgctggaacacagatgcgtggaatccgcgaagatcagagcgaaataccccgaccgggttccggtgatcgttgagaaagtctctggctctcagattgttgacattgacaagaggaagtacttggtcccatctgacatcactgtggctcagttcatgtggatcatcaggaaaaggatccagcttccttctgagaaggccatcttcttgtttgtggacaagacagtcccacagtccagcctaactatgggacagctttacgagaaggaaaaagatgaagatggattcttgtatgtggcctacagcggagagaacacttttggcttctgagcccttgctgggctaggtgcacccttcctgcttgtgtatcctgtaaataactggctgttctcagttactccgccggagcctccacacagacctactagtgcatttgtaactggatttatttcttaatatattggaaggttttgttttccttagattagtaaattatcatacagagttttattttcagttttcttttgtgcactgtcctcatggctatatgctccaaggaacctgtcctccggaatcacatttaatgaagatacttccgaaatgaagggcggtaggtgtggtattaaagtgacaaggagggatgacgcattgttctggattatgttcggagtgttagacggctaagtattaaaagcccccaaattaaatccttagcaatcagaacacttgcttcactagattttgccaactgcaaatcatgttggactgagctaatctgttctttctgagactataaggtaaatgattaacaataaagcctccatgtaaaggcattacagtgtgaccatggtcctcattcaccttcacgagtcagaaatggctcctgcaacagcttagcctaggatgggaagttgtggctggtatcataaaaagggttggtttttttcagtggttaatgtagtcataggttcagatttgggactgtatcaaaaggtttatactgcaaagtctcgcttctaccactttttctgatctctgctgcttatgggaaattgtatgggcttattttcagtattttagtagcaaaagtttaagtacgaatatatatatattttagaagttattttgcctgcatgtgtgtctgtgggcgtgactgatctgcatttgtgagctgccgtgtgggtactgggaattgaacccaggtcccctggaaaagcagccagtgctcttacatgcagaactctctctctagcaccatatatgcatatttgtttacatatgtaaataaaatgtgtatatgttattaaaacatatagagggctgaagagatggctcagcagctaagggcaatgaggtcctgggtttaattcccagcagccacatggtggctcttcatgatgtcatctgatgcccttacctgcctgcaggtctatttgcagatagagcactcatatacataaatctttctttaaaaaaataaaacgtatgtttatacactggaaaaaaaaaaaaaaaaaaaaaaaaaaa

SEQ ID NO: 25 - DNA, 4050 bp, Rattus norvegicus
ctgaagctggcttttgcgtttttctacacgtacactaattttatggaatagttaaagtgctatattctccgcgcaaccttttcaaattccaaatgtttgaacgttttggtgtcagcgcgagtgaaatcattttaccgacaagaactaactgaattgtctgcctcgttgagttgcctccggaaaagatctcgggggtggaaaagcaactgcaaaataacagacggagaaaattccttggaagttatttctgtagcataagagcagaaacttaagagcaagttttcattgggcaaaatgggggaacaacctatcttcagcactcgagctcatgtcttccagatcgacccaaacacaaagaagaactgggtacccaccagcaagcatgcagttactgtgtcttatttctatgacagcacaaggaatgtgtataggataatcagtctagacggctcaaaggcaataataaatagcaccatcactccaaacatgacatttactaaaacatctcaaaagtttggccaatgggctgatagccgggcaaacactgtttatggactgggattctcctctgagcatcatctctcaaaatttgcagaaaagtttcaggaatttaaagaagctgctcggctggcaaaggagaagtcgcaggagaagatggaactgaccagtaccccttcacaggaatcagcaggaggagatcttcagtctcctttaacaccagaaagtatcaatgggacagatgatgagagaacacccgatgtgacacagaactcagagccaagggctgagccagctcagaatgcattgccattttcacatagtgccggggatcgaacccagggcctctctcatgctagttcagccatcagcaaacactgggaggctgaactagccacgctcaaggggaacaatgccaagctcaccgcagcgctgctggagtccactgccaacgtgaagcagtggaagcaacagctggctgcctaccaggaggaggcagagcggctgcacaagcgggtcacggagctggaatgtgttagtagtcaagcaaacgcggtgcacagccacaagacagagctgagtcagacagtgcaggagctggaagagaccctaaaagtaaaggaagaggaaatagaaagattaaaacaagaaattgataacgccagagaacttcaagaacagagggactctttgactcagaaactacaggaagttgagattcgaaataaagacctggaggggcagctgtcggagctggagcagcgcctggagaagagccagagcgagcaggacgctttccgcagtaacctgaagactctcctagagattctggacgggaaaatatttgaactaacagaattgcgggataatttggccaagctactagaatgcagctaaagaaagtgaaatttcagtgccaatagatgaagagatactgtctgtcttcgtaggactgtttgggctctgtaccaagattgcacaaaattttttgaatatcattcctccagaaggagggtgttttgaaaattggaattgtatatttcagtataaattttagaatttagcttatagctagttgggggaaaaaagacatgaaaaacttgaaccacaaattacctccatgtacattggccatagttaaccagaaagttataagtagacacttaatgcaatcttttcccctgatagtagccaatgggagaattaacaatgtctgggtcccttctcctttttctgttcaacacagtgaagattatctgctttttaaatttatttacgatatctacagctgtgttttgtgtaaaaacttagtaatggaagccctgtctttgttgttatctgaataatttctcaggatatttttttgctgctgagaaagggccattaccaattaatccttgccaggagttggggagctatgtctctaattggaatcactataactgggtgtctggagttcttcccttttcgtactgagagtgttctcactctagtgactcctctggtacactccgtgttctccaatcttgtctgttgtactttacttttccatattgactccatgtatttatgagaagatattatctcccattttattatacattttgaagccaactaaacaaaggcagctgagtccttcagatatttttctttttaaatttatagtaaatttgacacagaactgaaattcagcagtccgtctttgacggtttagtctagcaatgttaaggatatttagagaaaatatgcagttacgtttatttatatatttggcaagaaattttttctggatgatcaatgcttttcaatttatgataaataatggttagggggcgctgtttattatagataattttaaggtatatagctgttttcaaggaggtccacttccgtctagcagccaagcagaggactgtatctaaatcgtgatcgtggcagatgggtcttcatagaaaccatgtctttattcaaacttcatagggcaatattttgaactgttacctaggcatttcaaaacaggaaataccgtcaacagactcttctccaagagcaggttttactgttgttttgatgtaattttaagacatttagcaaacatgcatttctttatatgatacatttctttcacaaaacaatttaaaagtaagccacgtgctgtctgctctgcccgggtaggaattgcatcagaatacatatatcttgctgtacaatgcctgtgatattgaagagggttcttttcatgtatgcttgagtatctaactctggagtcaatgaatgcactgacttttttttttgttcgtaccccaaatgattgaattgttaagtacaaattaagcagattaactcattttttcactcataaacagattcttagtactagttttgttttatatttatgtgtatgtatgtaaatacatacatattaatttatattagagtgaaaaataaattgtttgtttctaacattagtttctacagtaaggtgtctctgaaacatgtgtgtcagacacttagccaccatgcattctatgtgctaccccatcatgccagtcacctccatcgacgttagggtattttccttacctgtctattataaagagaataacttaggtacacatgctcagagccgagatatttctctgataaatcaggtaataaaatctatttgatgggtagaattttgaaaacagacatgattttatctatgagtttctgaatatcaaagaacaccaggttttcatttaaatagaggtctaacactagggatcagggaatttagttatgaagagtttaaaaaaaaaatctaaaaaagtaaaaaaaaaacagtataagctgttgataaggtaagcaaattattttaatgatgtaataaaatatttttaaattttggcatagtgatcatttaatgggaaaatactcaccaaaatgtctccacttgaattgtactgataatgtgaggcatatgtgtaactcaatatatacatatacctatatgtatatacagaaattatttttaatattttcctactgctgtgaaatttaaaattggaaaattttgtgagtgttttccatgtccaatagagcctaactgtttcttttttagtaacttaacaatctcttgagggctgcacctataaagtcccagcttgtcagtagacatgtacagtgtttgggataaggtggacacagtgcacatatgagtaagaccttcctgactattttaaacatcactcacatgaggagagcctctatgctataggttgtgtgcctactgtagcttttccatcgctgtattatatagacatttgcatattaaaatttgattttcccagagataaatattatatagtgtatctatatttagatcaaactgtggtaacatgttgatgagatcatagcgttggggaatgtagcctgaacgtgtggactcgcagagaccccgagggagagcaggggtcaatcccatctgtgtataagttattataactatgaaatcttgtacaaaagcaaaaactggaaaaaaaaacaaaaatacagtttttattttgaaat

SEQ ID NO: 26 - DNA, 4025 bp, Rattus norvegicus
gatatccattcacatatatatgtgtatgtatgtgtgtgtctgtgtgtgtgtcaatatagatacatatatatatatgtgtgtgtgtcatatagatacatatatatatgtatatgaagacaaagacagaaagctatgtaaaaacaaagttattgaaagcttcagattttagtgcatgtattggtgatcaccctgttaaatggtatccattgatagcatgcaatatatattgtatatgaaatgcttgatatatgtgtatatatacatatatacatatatgtgttttgtccatatatacatatatatgtatagaagcatgaagacagaaaatgatggaaaaggcaaagtcgtcaaaggcttgggttttcaaagtgtgcattgatgacccaaaaggaagtatcattgatctgtaatcattctaatctgcacagtctgatcccaggaaggccgactttgcttggatgctgatcagctaaacagctcatgttttgatgacaccaatattagtcttaccgagtctgagtaaactgtttatgaaatgatgattgttactgagtggatgctaaggaaataaattttcagtttggataaactgggcctaaggttatcaaaggtcagctgagacaaagcaagccagggtagtatatgacatgtgacttttatagaaggactactgtgcttggtaatacaccttctcttagactagagagaaaagaggaagcacagtgccacttaattgatcactgactatagcagatgctgtaaatactgtttatagttttttcaattattcaggtacgggccaatcaaagactgactttgcaactagtgtcaagggaagacgctaaatcttagatgaatacgtagctatagggaatatataaaaggccaggtgaggaagacacaaccaaaactcagaaacttctcctcacagaacaaccaacttgactcctgacaccatggcctgctgtgctactagcttctgtggctttcccacctgctccactggtggcacctgtggctctaactgctgccaacccagctgctcccagtccagctgttgccagcccagctgctcccagtccagctgctgccagcccagctgcacccagtccagctgctgccagcccacctgctcccagtccagctgctgtcagcccacctgctcccagtccagctgctgtcagcccagctgctgccagaccagctgctgccagcctacctgctgtcagaatagcagctgtcagaccagctgctgtggaactggcagtggccaggagggtggcagtggagccacgagctgccgtgttagatggtgccgccctgactgccgcgtggagggcacctgcctgcccccttgctgtgtggtgagctgcacacccccaacctgctgccagctgcaccacgcccaggcctcctgctgccgtccatcctactgtggacagtcctgctgccgcccagcctgctgctgccactgttgcgagcccagttgctctaagcccagctgctctgagcccagctgttaagacccatgttcctgagttgttagaaatgaaatggaaagcactgaagagttgtgtaaactgctacggacatgttctgtgtggtgaacgctaagtatcttcactttgctaacctgttcatcatagtggaactcttcaacaggatccccacagacgtgttggaattagtgcactgaacacatgtctcaatcagaatgttctggggatctttctttgctcaggtgacacacaaggatgcatcagtacatcatcccagtgacttgtggacgttctcctctagttccctacacatcttcagccatgctttctacttgaagagaccccgatgctctcaaagtgttttatgcccaagtgaatagatttctgttcaccttctaactttacgctgcccctgtttaaatgatagtaaccttcaggcatagacacataatctaaagcaaaatggttttatgaaaattaacttatgtttgaattgtctgctaataaaaattttctatgcattaaatactcttcatggctatttaaatgtgtgaatgttttattaaaatagacccagacccatagagttaccctgcatggactttttatatcaagtttaaccttgtcccatttagtacagtagatttttttttctttattcatgcactgcttaaaagaaactagattatctaccaagtagattggaaaatatctgccagtactatttctaatagtacttgggtttaattcctacaacttggcctaactccactccaccgatgtccagctgtgtgagcttcaactctcaacatccagatgtacttactgggtgggtgagggatacatctgtacttgacagagagtagagccagcagctgtgaggtgtaactgctgagttccaccatcacatcatacagacgcattagaaatctcaaaccgcagtatcacagtttgtaacttacaagccaattgaaaaaaaaaatgcctttcttaagacgtgaacacaaacctagagcaaaaggacatagattctatcgtgtaatgttaattcttatacaagcagttgactacaatacacaaactacataaagacctaagaaatttttttcaggctatttacatatccccagcacttacctctctcgttaaattggctgccatgatgaattacaaacaaaatggtacattccagaaaagagagaattggatgactgtacatttgtccaaggtgtcatcgctcctggatatttttctcaagctttttccaaccactaaattcaaacaaaaatagctcagcattccccagtgtcttcatggcaaataagtcttcgtgggcggcgctacaacttgaaagtgtttttactcattcttgagtggtgcaggcgttcgtgaatcataccttatactccaccccctcagttaatgaccactgaatcagattcaataaacatttaataagaatatatgaaaatcaggctggaaactttctgaaaaaaaaaaaaacaagttgtttggttcacagtgaaggaactctctctagcctgaactctaaataatgcttacatatttccaatccattgaaatgaaaagaaccagaaagaccatttgactctggtgctggagtcaatgtggtagatgtttccattgcatgtgaccaaagttgtgctcaatttggccagtccgccagtgctttaaattcgatagaattcagtctacatatgcaagagagaaaagtcattcttgaaaagacccaattgccttctgcattaggggtttgggtggatgggccaagtggcatgacaactattcagaatcagggcgttgccctaacctacagtgagaagactctttgaacatggaaaccacaaacacgactctaaagagtatgtggccaatagaacgagtcacagcgaccttataaaacaaaaccatccccataatatgtcacaagtatttcaatggaagccaatcagaggaccactgaggaacaaatttcaacgaaaacaagaaaaatatgttaagaattttataaacagccactcgctcaactatataaagggccccatgctcaggtttgcactcaaacacagaaactcatccaacctactcaacatccaatcaactcctgacaccatggcctgctgctctactagcttctgtggctttcccacctgctccactggtggcacctgtggctccagctgcttccagcccagctgttgtgagaccagctgcttccagccaagctgctgtgagacaggctatggcattgggggtggcattggctatggcctagagggtggcagtggagccgtgaactaccgtgttagatggtgccgccctgactgccgcgtggagggcacctccctgcccccctgctgtgtggtgagctgtatacccccaacctgctgccagctgcaccatgcccaggcctcctgctgccgtccatcctactgtggacagtcctgctgccgtccagcctgctgctgctactgctgctaatctacctattaagagccagatatc

SEQ ID NO: 27 - DNA, 2707 bp, Rattus norvegicus
gggacacgcacagagtccgcggcggcgccggagaggggcagcgcgccgggcaagctgagcaaaggacccaccttggacccctgctgatcatgaacaagatgaagaacttcaaacgaaggctttccctgtcagtgccccgcccagagaccattgaggagtcattgaccgagttcaccgagcagttcaaccagctccacactcagaggaatgaggacggcagggacgaacctgggcagctgtctccgggcgtgcagtatcagcaacggcagaaccagcgccgattctccatggaggacctcaacaagaggctctctctgcccatggatatccgcctgccccaggaattcctgcagaagctacagctggagaacccagggctgcccaaaccactcacccgaatgtcccgccgtgcctccctgtcagatatcggcttcgggaaactggaaacatacgtgaaactggacaaactgggggagggcacctatgccaccgtcttcaagggacgcagcaagttgacagagaacctcgtggccctgaaggagatccggttggaacatgaggaaggggcaccctgcactgctattcgagaggtgtctctgctgaaggacctgaaacatgccaatattgtgaccctgcatgacctcattcacacagatcggtccctcaccctggtgtttgagtacctggacagtgacctgaaacagtacctagaccactgcgggaacctcatgaacatgcacaacgtcaagatttttatgttccagctgctccggggtctggcctattgccaccgccgcaagatcctacaccgggacctgaagccccagaacctgctcatcaatgagaggggggaactgaaactggctgactttggcctggcccgggccaaatcagtgcctacaaagacctactccaatgaggtggtgaccctctggtacaggcccccagacgtgctgctgggatccacggagtactccacccccatcgacatgtggggcgtgggctgcatcctctatgagatggccaccggcaagcccctcttcccaggctccactgtcaaggaggagttgcacctcatcttccgtctcctggggacacctacagaagagtcgtggccaggtgtgacatccatctccgagtttcgagcctacaacttcccccggtacctaccgcaaccgctgctcagccacgctcccaggttggatactgaaggcatcaacctcctgaccagcctcctcctgtatgaatccaagagtcgcatgtcagcagaggcggccctaagtcacccctacttccagtctctcggggaacgagtacaccagctcgatgacactgcctccatcttctccctgaaggagatccagctccaaaaggacccaggctatcgtggccttgccttccagcacccagggcgagggaagagccggcgacagagcatcttctgagctacccacccggctgcacgttgagggacgagaggccactcggaacatgaattcaggaagtgtggggcctgtgtggcatcagagggctgaacaatgaatgcctgtggcagtctggaggaccactcagcagccctgttggtagcatttgcttccttcccttgcttgccacacagctctgcggtggcctctgcctggacaccaatcccttgtcacccactgtgggatggggcatgagctgcttccctgggaggaagtgagggtcaaggagggacccgggaccctttcccagtggacgtgcaggagaaggtgggggccctggcctgctggctcatcagcttgacaaacccccttcttattgcttggacccttacttcatcttcttccccccatggaggaggaggaatatggcaccttacctgggaaccctggaatcgcacccatgtgtgtgctgaccccacccaaaggcagatgtccccgaagcatcagaaaatgtagtgcctccccttgtctccacccccaccatgctgttgtcccctccttgccagaagccctgtgccctctggcttgcaccaaggctaaaaagcacaagcttgcttcccgtgtccaactgcatccggaagtgtcccgtgctcctagatgtactcctgccacctcagccagccccgtgcccatcccccagtctggaaagggttgccttaaactggcaggtggtcgagtgcgctgtgtccttggaactctgacctatgtccctcttccctaagccattcccgtgggtgttatcatccctgagggctgataagtcaaccctgtctcagggtcctgaggctggcacccagataggcaaggtcaccttgacactggtaccagagtaaccttggctctttagggctggtgcagcctctcccccatgctccacctccttcccagccctgtccacctgaccctggcaccgacctccacagagagggtggggagggcgtcggcaccacagcctaagctggagagaagtgaggttgcagcaggtttgatcctgacagcctcatcctacatccccagggaaggcacccttcctctgtactcccctcctgttctagggtctccccaacatttggctgaacttgaagggcaaaggtcaaagggaggtcaagctccatgccatcctaaccccttggagcctgggttctccctaaccccctttcccactgactgtgaatgtcgtgactcagagcaaagacagagaatatatttaattcatgttgtac

SEQ ID NO: 28 - DNA, 2984 bp, Rattus norvegicus
tgaagagccaagctggaaggtaccctgagccaccagtctgcagagccaccctgccgtccattcgaaggtcatttccctgttaccacagccagaagaggtgcgtacaggactgttggagaccctggagagaggccaccttgatctcccccgagactggagagtctcgccggaatccttacctgcgaactctcagctaagttaaatccagcagccatggccagcgcccaggttcctttctcctttcctctggcccacttcctcatctttgtcttcgtgacttccaccatcatccacctccagcagcgaatagtgaagctccaacccctgtcagagaaggaattaccgatgacgactcaaatgtcctcgggaaacacagaaagcccagagatgcgacgggacagcgagcagcatgggaatggagagctgcggggcatgttcacgatcaattccattggccggctggggaaccagatgggcgaatacgccacactctttgcactggccaggatgaacggacggcttgcgttcatccccgcatccatgcacaacgctctagcgcccatcttcaggatcagcctcccggtgttacacagcgacacggccaaaaagatcccatggcagaattaccatctcaacgactggatggaggagcgttaccgccacattccgggacactttgtgcgcttcacgggatacccgtgctcctggaccttctaccaccacctgcgcccagagatcctgaaggagttcactctgcatgaccacgtgcgggaggaggcccaggccttcctgcgtggtctgcgggtgaatgggagccagccgagtacttttgtgggtgtccatgtgcgccgaggggactatgtgcatgtcatgcctaatgtgtggaagggcgtggtggctgaccggggttacctggaaaaggccctggatatgttccgggcacgctattcatctccagtcttcgtggttacaagcaacggtatggcctggtgccgggagaacattaatgcttcccgaggagacgtggtgttcgcgggcaatggtattgaggggtcgccagccaaggacttcgcgctgctcacccagtgcaaccacaccatcatgactattgggacctttgggatttgggctgcctacctggcaggtggtgataccatctacttagccaactacacccttccggattctccgttcctcaaagtctttaagccagaggcagccttcctacccgaatgggtgggcatccctgccgatctgtccccactccttaagcactaacaccagcctgtcctcggtcccacttccacctcaaggcaaaaggagtcacttgttacgtcgcaggaagagccttctgatgggaagaagtgtgccttgggctgccaacgagaagtactaacatgttcagaaagcatatttacatgttagatgcggccagctcagctccaacatttgttaacagctcagacatcatcagtggcccctgttcctgaagactcctagcagtgccatcaccgtttttcagcacagctgacccatggcgccagacgggctgctacccgcagacagccacttccagaggcagcaagaaaaggcacgctatggtcttttctttaggttccttttgaagggtgagacaaacttgagtctgcctacttttttttttttttccacggtggggcagcatgtgacaggcaagagtcagatagggagcctgagcaaggagaggaggccagcttgtctttttatagcaactgccttcccccgactgactggagtctgctaagaacctttgaaggtggtgacctaggaacttctcatagtctctcaagattctttctctttttaaattatgggtgtatgtgtggacgtgtggagtaccttcagaggccagagctgggtgtcggatccctggaagtggagtcataggcagctggcactgcgagaggcaggtctcaccagcagcacacagaggaccaaaggcaagtccagtgaaagccacccctctacaagcatccagctagctcctctgtccccttgacaagagttgtgtcactgtgtgcctacatggctcgttatgagtcaaggggaggaagaatgctgggattggtttaccctgggatccaaagtaggagttattcactgcacaaaggcacttgatcaaaagggatgtgggagctaccatgagcccacagtcccctcacccagttgcttgcccttgggactgggtccgccaaggactccttctttacctactctgtccatctgagaagacctgtgtgggcggaattcagatgcaccggttgcatgtctgcctctgcagccctggtaggacacctccaatcctagggaacccctccagatgtttcagagttatcttaccatcttgttacacttcaagtgtgagcacacacgatgcatccctctcacaattaaaaaatacaacctatgcagctaccattatgaaaacagccagggtgatctggggggaagaggcctcggaaaggtgttctttttggacagcagaaacccaaggtgtctctccagaacccctgctaagttggtagtgctgatcctgtgcataagaagtagcctggagtggccatggtagcacctgactttcacctttgtactgtgaaggctaaggcaggaggccctacatcctcaggccctctctcaacaaagaaaattctcaaactgggtatagcaatgcacacctgtgatcctagcatcaggatcaggagttggaagtcatccccagccacacagggaatgcagatcagtctgagctgcatgagacccccatctcagaagtagaaagaaaattgcaaaaatctaggctcaacagtggtggcatacacttaaggagacagaggccaatagatctctgagtttgaggctagcctgggctacacagaaatcttatttttaaaaaatatatattttttcaaaaatccaaaacaaataaaaatgtgcctttccatcac

SEQ ID NO: 29 - DNA, 898 bp, Rattus norvegicus
caagatggaggagtacgcgagagagccgtgcccctggagaattgtggatgactgtggcggtgcctttaccatgggtaccataggtggtggcatcttccaggccttcaaaggttttcgaaattctccagtgggagtaaaccacagactccgagggagtttaacagctattaaaaccagggccccacaattgggaggtagctttgcagtttggggaggcctgttttccacgattgactgtggtatggttcagataagaggcaaagaagacccctggaactccatcactagcggtgccttaacaggagccatcctggcagcaagaaatggaccggtagccatggttgggtcagctgcgatgggcggcattctcctagctttaattgaaggagctggtatcctgttgaccaggtttgcctctgcacagtttcctaatggccctcagtttgctgaagaccactcccagttgccttcaagccagttgccgtcctcaccatttggagactaccgacagtatcagtaggacttggtccccgggattcctggacctgggtggactgcagtttggtagggtttcagaagatcaagttacagtctgttgaaagccttaggtgggacaccggcggccaagcaggccatcaagagacatttagcacatttttctatttaaaagagactcagagtgtggaaaagataccgagtttatttattcatgcttggattgcgtctgtgatcaaaataaatgtctaataccatttaaagaatgtatatgaacttagaagataaaggaccaaaggccacataacagtgaaattcgactgtccttccttcgggacttttttgcctggtgtttatgtacagttgttcagacaataaaaggcttttgggacttgacctttcc

SEQ ID NO: 30 - DNA, 1102 bp, Rattus norvegicus
gcaacgcgggtcttcccgctgttgctgtcggggccacggccgagcacacgaccccggcctgaggtggtggtgggaagcccgccgctgtttgctgcgacctcatggagggtggcggaggaagtagcaacaaatccaccggcgggttagcgggcttcttcggagcgggaggagcgggttactcgaacgctgatttggccggcgtcccgctgactggtatgaaccccctgtctccttacttaaatgtggacccacgctatctcgttcaggatacagatgagtttattttgccaactggagctaataaaacccgaggcaggtttgaactagctttcttcaccattggaggatgctgcatgacaggggctgcattcggggcactgaacgggcttcgtttaggattgaaggaaactcagagcatgccctggtccaaaccaagaaatgtacagattttgaatatggtgactagacaaggggcactttgggctaatactctaggttccctggctttgctctatagtgcttttggcgttatcattgagaaaacacggggtgcagaagacgacttcaacacagtagcagctggaaccatgacaggaatgttatataaatgtacaggtggtcttcgaggaatagcacgtggtggcctggcgggactgacactgaccagtgtctatgcactgtataacaactgggagcacatgaaaggttccctgctccaacagtcactctgaagatgtctgccacctcaggaatgggggacacttcatagtcatccagatcaaggaataagtcagtctggagctgctttctctcttgcacctacaattactttgaacaattggagactctgatttgctgtgacaaagatcatggatgcttagcctggactgcactgcttgccctctgagtggaagccaaacccttggtggctcactgagaatgtgttctcttctcctttggagatgacctcgcacctcctgcccccaaactggaaaaccacttactctccaaatttattaccatgttaattcatttaaaaatctaaaacttaatattgccctgttttccaaataaagggtgaaaatacaaccaaagctaaaag

SEQ ID NO: 31 - DNA, 2148 bp, Rattus norvegicus
gaggctgacgcgccgcgctaccggtcagatcttaaaaggccgggcagtgcgtgtggcatcccgacagaacaggagaggagcaagtggcagcgcccggtgttgggagcgtggctgtcactgcgctggagcatccctgagcttctgaacagagccgggtagtcagcagtgcagcagccgcaactccacgccgagccgagctcaatctgtctcgtgtctccgctccggcgatcctccgagactccgcacaaagcacattttccaaagcagcgcaagggagcgcccagccgcgtgcaggcggacgcacccttcctgtcctttgttccgggggggatctgcagctgctcttctcccccaactcggagtcttccctccaggggtggcaggtcgccgaatacagcaacgaagatgcctttggaactgacccagagccgggtgcagaagatctgggtgcctgtcgatcaccgaccctcgttgcccagatcctgtgggccgaagctgaccaactccccaacggtgattgtgatggtggggctcccagcccggggtaagacttacatctccaagaagctgactcgctacctcaactggataggtgttccaacgaaagtgttcaatgtgggagaataccgacgggaggctgtgaagcaatacagctcttacaacttcttccgccctgacaatgaggaggccatgagagtccgaaaacagtgtgccttagctgccctgagagacgtcaaaagctacctgacaaaggaaggaggacagattgcagtttttgatgccaccaatacgacgagagaaaggaggcacatgatccttcattttgccaaagaaaatgacttcaaggcatttttcatcgagtccgtctgtgacgaccctacagttgtggcctccaatatcatggaagtgaaaatctccagcccggattacaaagactgcaactccgcagaagccatggacgacttcatgaagaggatcaactgctacgaagccagctaccagcctcttgaccctgataaatgtgacagggacctgtcattcatcaaagtgattgacgttggccggaggttcttggtgaacagagtgcaggaccacatccagagccgaatcgtgtattacctgatgaacatccacgtgcagccccggaccatctacctgtgtcggcacggcgagaatgagtacaacgtgcagggcaagattgggggcgactcaggcctgtccagcagaggcaagaagttcgccaatgccctgagcaagttcgttgaagagcagaatctgaaggacctccgcgtgtggaccagtcagctgaaaagtaccatccagaccgcggaggccctaaggctcccctacgagcagtggaaggcgctcaatgagattgatgctggtgtgtgtgaggaactaacctatgaggagatcagagacacctaccctgaggagtatgcactgcgtgagcaagacaaatactactaccgctatcccacaggcgagtcctaccaggatcttgtccagcgcctggagcctgtgatcatggaattagagcgccaagagaacgtattggtcatctgtcaccaggctgtcctgcgctgcctactagcctacttccttgacaagagtgcagaggagatgccatacctgaaatgcccacttcacacagtcctgaaactgacgcccgtggcgtatgggtgccgtgtggagtccatttacttgaatgtagaatcagtgagcacgcatcgggagaggtcagaggctgtcaaaatacaacactttgccagtgtagtcagaccttcctcttacaccgaacttgactttctgtctgtggagtccgcaaaacaggatgcaaagaagggacctaaccctctcatgagacgcaatagtgtcaccccactagccagccccgagcccaccaaaaagcctcgcatcaacagctttgaggagcatgtggcttccacttctgctgccctgccaagctgcctgcccccggaagtgcccacgcagctgcccggacaacctttgctagggaaagcctgtctacgaactgtctgtcacattttttcaaagttttctccttactaacctgggaaagaacatgaggagcccccggagcggtgccgaatcttcccagaagcactgatgctgaagtaggggttc

SEQ ID NO: 32 - DNA, 924 bp, Rattus norvegicus
cttgatttcgagcagttccagaccctacaactgggagtgaccgctagtgacagtggaaacccaccattaagaagcaatatttcactgacccttttcgtgctggaccagaatgacaacactccagagatcctatacccctctctccctactgatggctccactggtgtggaattggcgcctcgctccgcagagccaggttatttagtgaccaaggtggtggctgtagacagagactccgggcagaacgcttggctgtcctaccgcctgctcaaagccagcgagccaggcctcttctccgtggggctgcacacgggggaggtgcgcacggcccgagccatgatggacaaagatgctctcaagcagagcctcgttgtaactgtgcaggatcacggccagcctcctctctccgccactgtcaggctcaccgtggcggtggctgacagcatcccagaggttctggaggacttggttagtctagagtctcctgccaacccggatgagtcgagtctcaccctctacctagtggtggccatcactgcagtctcctgcatcttcctcatctttgtcatcgtactgctggctctcaggcttcggcgctggagctcatcacgtctgctccaggctgccagcggattggctggcgtgcctccttcgcactttgtgggtgtggacgggatgcatgctttcctccagacctattcccacgaagtttcgctcactgcagactcaaggaagagtcacctgatcttcccgcagcccaactatgcagacacgctcatcctagctcaggagacctgtgggaaaagcgagcctctactaatacctgaagactcagctacagttttaggcaaatgtgagccaaccgatattcagcaagccccgcccaacactgactggcgtttctctcaagcccagagacccaaa

SEQ ID NO: 33 - DNA, 2098 bp, Rattus norvegicus
gctgaaggaactttttgtctttaaggaaggaaggaaggaaggaaggaaggaaggaaggaaggaaagaaagaaagaaagaaagaaaggaaggaaggaagaaagaaagaaagtttgtccgagtgatggaatacacctctgaggcttccattgttaggtgggatcaggtgaccagagtgtggcagctcctggattctgtgaaagtaggcacaggatgttagcatcccatgttcactgctatggatgcctgtgtatatggctaatacggaggctgctggatctattccttgagagcaacacacagtactatcggagcgtaataccaacagctcagtgcctggtgcttggcctcagaacatctcagctgaagtcccagcatgccccatgcctccaacttttaagctcaacagttaatctcaaaattgtgcccaattaaaatgggcaggagaatgtatttccctctgcattgtctacacgtgtgttctatgtgactaggttttcctgacgtagttcctcgaacaccactagtctggactaaatggagaggttaaatattcaactcttaatattcaatacaaaaggagggaatcaagagatcaggaaagataaaatatgtgttactttgcaagattttgtgagaacaaaaaaaaaaatggaaggaagagttctccctccttggtttggtacctctttaaaaatgttatacacaatgggtttttaaatgaaggagatggatatatattttctaaatattatggaatgagagaagcaactgggcacatttggtattagcgcattcttggggcggagaggggggggtcaatcaatgtctatgactttgctttagaaattagaaaagattgctatcaggatttttaattcaccccgacaaagttattggtcatagcaaaccaaatttcaaaatgatcctctctcagggcaattgttagcattttccccactttgtagttttctgagattgtaacttttcacggcagggtagctgcagtgtctcaggtctgcctcacataggagagaaggactgggaggcttacctttcctttgttgtagaaaactccgggcgcacggttccctttaaacagtttcactcttctcagcccaacctttctctccatttttggaaaatacctaaatcaacccagacacccaacaccttcatctctgaaagattttggaatggcttgtagtctcattgtgacacggagtgaaaggtgaaggaaacggttgcctattttttaagcattcctcgcaattttactcattttactccaaactgcagtcaaggaagcattttttttttttttgcaccagcacgctgagctgggaagtgtacaacaactgtaccatgtcttttgttgaagcctcccgtgcggctgtaatttaactgttacttggcaccacttggtagaagacgcttcaaagcgtacagttctgtaagaggttgcccgcgagtttatataaagtaattaatgattccccaccccagcccagccaatgtgtatgtatggctatgtggaaatgatggcggtacatcagcttaacttatgggtaatatatatttacatcatgcatttgatagaatggcagacattcggtgcttttgaaggcaagatatgtacacagcctaatagaagaaacgtgggcaggatcaataaagctaggatagctgtaatttctctgtgatttcgaatgatcgggcaacgccatacaaatgcttctgtttgtactctgagtccctatgctttcgagtggattcctcctgtttctcggatgtaaaaccgggcgcccaggcattcagagtgcctgtgacacccaggtttttatatattagcaggcaacttcttcatcacaagggcaggtttctcaacactcccttcttcctcgtggagcccatcagcgaagttcagtgaaatgaataacataattggtggttggttcaatcactaccagtctagactagcccagacgcatcaattagaggggactgtcttttagagggagagtgtaaccgaaacaagcagggtattattgatactgatctttaaaagcgaaaatccagcctggcaaaaaaaaaaaaaaa

SEQ ID NO: 34 - DNA, 1994 bp, Rattus norvegicus
ggcacgagcgggagggaccggcggctccgcccgagcgcggccgcccagccccgggccgcccagccgcccagcccccgccctcccgccggcccgcgcctggcggcggccccgacaccgacagagcagccgcgctgccggcggaatggagcggcgccggggctgagccgggcgcactcgggccgccgcatgtgccgcgcggggagcagctgccgagcgggcggagagcgaacgccaggggccccgtcggagcggccacaggagcagcgccggagatgggagagcagcccatcttcaccacgcgagcgcacgtcttccagattgaccccagcaccaagaagaactgggtgccggcaagcaagcaggccgtcactgtttcctacttctacgatgtcaccaggaacagctatcggatcatcagtgtggatggagccaaggtaatcataaacagcaccatcaccccgaacatgacgttcaccaaaacttcacagaagttcgggcagtgggctgacagcagggccaacaccgtgttcggtctgggattctcctcagagcagcagctcacaaagtttgcagagaaattccaggaggtaagagaagctgccaggttagccagagacaagtcccaggagaaaatcgagacgtcaagtaatcattcccaagaatctgggtgtgaaaccccgtcttccactcaggcatccagcgtcaatgggacagatgacgagaaagcctcccatgcgagtccggccgacacacacctcaagtctgagaatgacaagctgaagatcgctttgacacagagtgctgccaatgtgaagaagtgggagatcgagctgcagaccctgcgggagagcaatgcccggctgaccaccgcgctgcaggagtcggcggccagtgtagaacagtggaagcggcaattctccatctgcagagatgagaatgacaggctccgcagcaagattgaggagctggaagaacagtgcggtgagatcaacagggagaaggaaaagaacacccagctgaagaggaggattgaggagctggagtcagaggtccgagaaaaggaaatggagttgaaggatctccgcaaacaaagtgaaatcatacctcagctcatgtccgagtgtgaatatgtctctgagaagttagaggctgcagaaagagacaatcaaaacttggaagacaaagtgcggtctctaaagacagacatcgaggagagtaaataccggcagcgccacctgaagggggagctcaagagcttccttgaggtgctggacggaaagatcgatgacctccacgacttccgccgagggctctccaagctaggcacggataactagggtggggcggagcctagatggagagtggaaagcgtgtgtgagagatgaagtgggcatagggcattctccgtttgcttctgtaatgcgggtgcgttctgtctgtctccaggccagtcgtgccgtccactcgctcctccagaatagaaaatctcttgcttctctggctttgtgaggtcgtggacacctggaagcttctgactcaggaatccagaacggtctaccttagccgtttacgcagtcagggcagggacattcagatcttcccttaagggctgttgcaaccctatgaactggggatgggggaagtattttctaatccaagtatcattaacctttacaacaggcctttgggcgccttccgctgcgtggcactcagtgtgtgagactctagattccagaccgggagcacgtggagggaacatcttttcccaggatgcattctgttcctttagcagaggtagctaacctttcgaagttatgacagatttcacactcaaaaactgcacaattgatctacccaaaaagaaataattatttaaaaaaaaaaacctaacatattttaagtaaatacactgttttgggttggagcgcattcatagttaccctcagctgcatgtggcctttggactgtaggccacacaaacctcgtgccgaatt

SEQ ID NO: 35 - DNA, 2866 bp, Rattus norvegicus
gtggaggaaagttgcgtgtggcacagacccgacggcgcagcgccacagcgaccgggggatcgtgtgtcttggaaaaaaaagtcgctgtccccctaagcgagacccacaagcgagcgggccccgtgggcccggggacgacgccccctctgcggcgtggactttgtcggtggccttctaggaggaggaatatggcatctaaagggtccccttcttgccgtctggttttctgcctcttgatctccgccgcggtcctcagaccaggcctcggatggtacactgtcaactcagcatacggagataccattgtcatgccttgcagactggatgtacctcagaacctcatgtttggcaaatggaaatatgaaaagcctgatgggtccccagtatttattgcattcagatcttctacaaagaaaagtgtgcagtatgatgatgtaccagagtacaaggacagactgagcctctcagaaaactacactctgtctatcaacaatgcaaagatcagtgacgaaaagagatttgtgtgcatgctagtgaccgaggacaacgtgtttgaggcacctaccctggtcaaggtgttcaagcaaccatctaaacctgaaattgtaaacagagcagcgtttcttgaaacagagcagctaaaaaagttaggtgactgcatttcaagagacagttacccagacggcaacatcacgtggtataggaatgggaaagtgctacagcctgttgatggagaggtgtccatactttttaaaaaggaaattgatccaggtactcagttgtataccatgacttcctccttggagtacaagacaaccaagtctgacatacaaatgccattcacctgttctgtgacatattatggaccttcgggccagaaaacaatttattctgaacaagcaatctttgatatttactatcctacagagcaggtgacaatacaagtactgccaccaaaaaatgccatcaaagaaggggacaacatcacccttcagtgcttggggaatggcaacccacctcctgaggagttcatgttttacttaccagggcaggctgaaggcataagaagctcaaacacttacacactgacagacgtgagacgcaatgccaccggggactacaaatgttctctcatcgaccaaagaaacatggcagcttcaacaaccatcactgttcactacttggatttatccttaaacccaagtggggaagtgaccaagcagatcggtgataccctgcctgtgtcttgcacaatatctgcaagtaggaatgcaactgtggtgtggatgaaggataacatcaggctccgatctagtccatccttttctagtcttcattatcaggatgctgggaactatgtctgtgaaactgctcttcaggaggttgagggactgaagaaaagggagtcgctgaccctcatcgtagaaggaaaacctcaaatcaaaatgacaaagaaaactgatcccagtggactgtctaagactataatctgccatgtggaagggtttccaaagccagctatacagtggaccattaccggcagtggaagcgtcataaaccaaacagaggagtctccttatattaatggcaggtattatagtaaaattatcatttcccctgaggagaatgttacattaacttgcacagcagaaaaccaactggagagaacagtaaactccctgaatgtctctgcgataagtattccagaacacgatgaggcagacgatataagtgatgaaaacagagaaaaggtgaatgaccaggccaaactaattgtgggcattgtggttggtctcctcctcgccgccctcgtcgccggtgtcgtctactggctgtacatgaagaaatcgaaaactgcatcaaaacatgtaaacaaggaccttggtaatatggaggagaataaaaagctagaagaaaacaatcacaaaacagaagcctaagagaggagttgtttagatgtcctgagaaaaaaacatataaagaaattgaagcatgaacgtgattgtatttaagacatatacaaagacaatgacagcaattcatggttcaagtattaagatgttcatcctactaagctgtcctgggatcttagagaattatctcaagtaaaacaatgaaataaagttataaaattacaacaagatttggcagccatgataataggtcatatgttgtatttcgtttgattttccttttctgtaaatgtctgcactgaggatttctttcagtttgccttttatgtaaattttttacgtagctatttttatacactgtaagctttgttctgggagtggctgttaattggatgtacaatgtaatgtttatttcaattgtttatatggatagtctgagcaggtgcggttctgattctgattgctatcagtaatgccccaaactttcttgtgaggatctgaaacccaaaggtggcagttatgagattgggacatggatcttgcccaatcagaagctggttttttttttaaaaaaaaaaacctggagagtcaggagcaccataagatatgatggtctctatgtgccaacgggttccccgaagcgggtcacaaacacatacggcaacaccacatgtgaatgatacttttaaactgacaatttcgtcttctctgaaaaaagacatacacagagtttgtataacactttacttaacgacacttgctagaaaattacattctgtttttaaaaaaaataaggaaaatgtaaagaagaatatctaatatgtcagagaaagttggaaacaaatcacagctcgcatccccatagtcgcagatcacgatgtaaatcactgtaattaaaattggtgttaaatcctttgggttatccactgccttaaaatgacacttatttcctt

SEQ ID NO: 36 - DNA, 1529 bp, Rattus norvegicus
ggacagcgagatcctcttgctaacgagaagccgcgggcgccccaaagcctcgggacccgggcgaccaaaccccttgcgacgcctttcgcgtccctgctcatggtggtggtggtgccctgagcccctctcgggccgggcagacgaagaccgacacggcgcccaggccccctgccgcggcgtccccgcggccccagcccagggagaagatgagcgtgggctgccctgagcctgaaccgctccactccctgccttgctgtgggccgggggccgcccctgtacctggtgcaggtgtgcccctcctcacagaagacatgcaagccctgaccctgcgcacactggctgccagcgacgtcaccaagcactacgagctcgtgcgggagctgggtaaagggacctacgggaaggtcgacctggtggcttacaagggcacaggcactaaaatggccctgaaatttgtgaataagagtaagaccaagctgaagaacttcctgcgtgaggtgagcatcaccaacagcctgtcgtctagccccttcatcatcaaggtcttcgacgtggtcttcgagacggaggagtgctatgtctttgctcaggagtatgcacctgctggggacctgtttgacatcatccctcctcaggtggggctcccggaggacacggtgaagcgctgtgtgcagcagctggggctggcactggacttcatgcatagcaggcagctggtgcaccgcgacatcaagcccgagaatgtgctgctgtttgaccgtgagtgccgccgcgtgaagctggctgacttcggcatgacgcggcgcgtaggctgccgtgtgaagcgagtaagcggcactataccctacacggcgcccgaggtgtgccaggctggccgcgccgatggcttcgcggtggacacgggcgtggatgtgtgggcattcggcgtgctcatcttctgcgtgctcactggcaacttcccgtgggaggctgcgtcaggtgccgatgccttcttcgaggaatttgtgcgctggcagcggggtcgcctgcccgggctgccatcccagtggcgacgctttacggagcctgctctacgcatgttccagcggcttctggcgctggagcctgagcggcgtgggcccgccaaggaggtctttcgcttcctcaagcatgagctcacatctgagctgcggcggcggccatcgcaccgcgcacgaaagccacctggggaccgcctgcctgggcccctgcgccttgaggctccagggccactcaagcgcactgtgctcaccgagagtggcagcggctcgcggccttccccacccagcgtagggcccgtggtacccgtgccagtgccagtgccagtacccgtacctgaggctggtctggctccacccgcacccccgggcaggaccgacggccgtgcggacaagagcaaagggcaggtggtattggccacagccatcgagatctgcgtctgagccgctgcagcacagctgttgcggggaagccgcgcgctctaacccgtactagggacaaggagcagccgc

SEQ ID NO: 37 - DNA, 1278 bp, Rattus norvegicus
atctgtttcccaggagactctggaaaacgcaggggcagagtccccaacagcagctgagggctcgaagagactaggtacctgcttgtggagttttttgtcccggagcaagctgtgtgctcagacttgaccatgtttgggcatggaggctcaacccagatggaactgaagactgcttccctagagaccaactggagaccaaacttcctgctagagctccaaggcctgacttggggtgggggggtgggggccagtggagagaaaccatctgccagcggagacccagggaactaaatgactgttgcctcctgtggccatggggaagaagctggtgatggcccagaagcgcggagagactcgagccctctgcctgggggtggcgatggtcgtgtgtgccgccatcacttactacatcctgggtaccactgtgctgcccctctaccagaaaagtgtgtggacccaggaatccacctgtcacttggttgaaaccaacatcaaggaccaggaagagctggagggcaggaaggtgccccagtacccatgcctttgggtcaatgtatcagctgtgggcagatgggccatgctgtatcacacagaagacactcgggatcaaaaccaacagtgctcctatatccccaggaacctggacaactaccagacagccttggttgatgtgaagaaggtcagagccaatttctacaaacaccataatttctattgcttttctgcacctcaagtcaatgagaccagtgttgtgtaccagcgcctctatgggccccaaatcctcctcttctccttcttctggcccaccttcctgctgactggtggccttcttatcattgccatggtaaagctcaacaggtccctctctgtcttggcagctcagaagtagaccaatctcttctgcacagcagcatggagtcaccaggaacggcaggggtcccgggcaggcataattctcttcctcttgtcctccatttaatttgttcaacctctttggacaatcatttcttgctcaagaatgtttaacagctctctccggttgacttcgaagggcaaaggaactgccagtcacagctctcgatccccggcttcagttggctcacatctgttacctgctatgtcactgtctactcccaagacgatgaatatcgtcacctctgtccctatgtgctctctcttagttcctcagatacccacctttgacatccaggatgctgtccttggccaaattcagcttctttgaattgtcataaaagccatagctctcaaaaaaaaaaa

SEQ ID NO: 38 - DNA, 2346 bp, Rattus norvegicus
ctcgcatctctctgcagcagcctccggggctacgttccatcctatcagtctgagaccagcccagaagaaaaaaaccaaaaatccttaattatcttcttttgctcggtacctacattgggaccatcaaaaaaaaattattacagtaaaccgtagccatgagggaaatcgtgcacatccaggccggacagtgtggcaaccagatcggtgctaagttctgggaggtgataagcgatgaacacggcatcgaccccaccggcacctaccacggagacagcgacttgcagctggaccgaatctctgtgtactacaatgaagctacaggtggcaagtatgtccctcgagctatcttagtggatctagaacccgggactatggactccgttcgctcaggtccttttggccagatcttcagaccggacaactttgtttttggtcagtctggggcaggcaacaactgggctaagggtcactacacagagggagctgagctggttgactctgtcttggatgtggtgcggaaggaggcggagagctgtgactgcctgcaaggctttcagctgacccactcgctgggtggaggcacgggctctggcatgggcaccctgctcatcagcaagattcgagaagaataccccgaccgcatcatgaacaccttcagcgtggtgccctcacccaaagtgtctgacaccgtggttgagccctacaacgccaccctgtccgtccaccagttggtagagaacacagatgagacctactgcattgacaacgaggctctctacgacatctgcttccgtacccttaagctcaccacgccaacctacggagacctgaaccatctcgtctctgccaccatgagcggtgtcaccacctgcctccgtttcccgggccagctgaacgccgaccttcggaagctggctgtcaacatggtgcccttcccgcgtctccacttcttcatgcctggctttgcccctctcaccagccgtggaagccagcagtaccgggccctcactgtgcctgaactcacccagcaggtcttcgacgccaagaacatgatggccgcctgtgacccacgccacggccggtacctcacggttgcggctgtcttccgtggacggatgtccatgaaggaggtagatgagcaaatgctcaacgtgcagaataagaatagcagctacttcgtggaatggatccccaacaacgtcaagacggctgtctgtgacatcccaccgcgaggcctcaagatggcagtcaccttcatcggaaacagcacggccatccaggagctcttcaagcgcatctctgagcagtttacggcaatgttccgtcggaaggctttcctccactggtacacgggtgagggcatggacgagatggagttcaccgaagctgagagcaacatgaatgacctcgtctctgagtatcagcagtaccaggacgccaccgcagaagaggaagaggatttcggagaggaggcagaagaagaggcctaaggcggaagccctgcgtcacctcaggctgcttagttcccttagcttttttccaactgccctttgtttctttctgctgcctctgtcctgtttttgttccgttttgttttctcattggggggtaaacggtgcctggcacgtggcaggcgctcaataaatatttctttgtggaatgtctcctttctctttccgatctgacattctgagcgttaaccctgtgcttcctcctggtacccatttctttattatgactgtccagttaatattcttccaatatattctccaggaaccagcgttcggctccagacccggggtagaacccagcccagttctaagaactcaagagagtagccaccatcttaaagcaaagtagcgggtggggaaaaggtgggtagaggagatgctacttagggggtgggattttccagtcagggccatttagacacgggaatcgctggggctttcagtcgatggggctttcttttttccctgcttcatctctcggcctcaggagaggtattaacagtattatcaccatttatatcctagctgtcctgagccaaatctgccattggaggtgtcttcccctgtgttggttctccaagggacgttgtatggggatttgtgggggcagggcagcaaggccttgttctctaaatgtccagaaacactctaattaccatttccacctgggtgcctcacacactccccagaggggaggtaacatctctgccccatttccatcctgttccttggcttggtcattccctacctttctattttctgttaaacttggctttttttttttcatattgaaaagatgacattgccccgagagccaaaaataaatgggaattgg

SEQ ID NO: 39 - DNA, 1565 bp, Rattus norvegicus
atgtattcctccccgctctgcctgacccaggatgagttccacccattcatcgaggctctgctgccgcatgtgcgtgccttcgcctacacctggttcaacctgcaggcgcgcaagcgcaagtacttcaagaagcacgagaagcgcatgtcgaaggacgaggagcgcgcggtgaaggatgaactgctgggtgaaaaggccgaggtgaagcagaagtgggcgtcacggctgctggccaagctgcgcaaggacatccggcccgagtgccgcgaagacttcgtactggctgtgacaggcaagaaggcaccaggctgtgtgctgtccaacccggaccagaagggcaagatgcggcgcatcgactgcctgcgccaggctgacaaagtatggcgcctggacctggtcatggtcatcctgttcaagggtatcccactggagagcacggacggcgagcggctggtgaaggccgctgcctgcgcgcaccccgtgctgtgtgtgcagccgcaccatattggcgtggccgtcaaggagctggacctgtacctggcctacttcgtgcgggagcgcgatgcggagcagagcagcagtccccggacaggagtgggctcagaccaggaggacagcaagcccattacactggacacgacagacttccaggagagcttcgtcacatctggcgtgttcagtgtcacggagctgatccaggtgtctcggacacctgtggtgaccggaaccgggcccaacttctccctgggagagctgcagggccacctggcatacgacctgaacccagccagcgctggcatgagaaggactctacccagtacttcctccagtgggagcaagcggcacaagtcgggctcgatggaggaggacgtggacacgagccctggcggagactactacacatcacccaactcgcccacgagtagcagccgcaactggacggaagacatggaaggaggcatctcatccccggtgaagaagacagagatggacaaatctccattcaacagcccatccccccaggactccccccggctctccagcttcacacagcaccacaggcccgtcatcgcggtacacagcggcatcgcgcggagcccccacccgtcctcagccctgcacttccctgccacgcccatcctgccgcagacagcctccacctacttcccccacactgccatccggtacccgccacatctcaacccccaggacccactcaaggatctggtgtccctggcctgcgacccggccacccagcagccaggaccgcctgctctccgcccggcacgtcccctgcaaacagtccctttgtgggattaggacggagggatcctcttgcgggacagtcctggtacctggggtagcggaggttgccttcccacacctccttcatcgccggtggagtcccagggtgacagtcccagcctgcatttttggtggaaaattagacgagtgagaagtcccctgccaactcccagctcaatggcaatgacaggaggagaaaggacaaaagacaaacaagaaacaaaacccttcccaaccaagatgaaaacacatgggagctc

SEQ ID NO: 40 - DNA, 616 bp, Rattus norvegicus
ggtccatcacctcccctccttccaccagcaccaccaagcgccccaagtccatcgacgacagtgagatggagagtccagtcgatgatgtattctatcctgggacaggccgctccccagcagctggcagcagccagtctagcggatggcccaacgacgtggatgcaggccctgcttctctaaagaagtcaggaaagctggacttctgcagcgccctctcctctcagggcagctccccacgcatggctttcacccaccacccgctgcctgtgcttgctggagtcagaccagggagcccccgggccacagcatcagcactgcacttcccttccacctccatcattcagcagtcgagcccgtacttcacacacccaaccatccgctaccaccaccaccatgggcaggactcgctgaaggagttcgtacagtttgtgtgctctgacggctcgggtcaggccaccgggcagcattcacaacgacaggcgcctcctctgccaaccggtttgtcagcatcggatcccgggacagcaactttctgaacatcccacagcagtctcagtcctggttcctctgattaagatcaacaaagaaacaacaaaattttaaaaaaaaaaaaaaa

SEQ ID NO: 41 - DNA, 2090 bp, Rattus norvegicus
ttgcaagcaccgtccttccaatggcggaccagagaatggacatttcctccacaatcagtgacttcatgtctccgggccccaccgacctgctctccggttccctgagcaccagtggtgtggactgcaaccgcaagaggaaaggcagtgccactgactaccaagaaagtatggacacagacaaagatgaccctcatggaaggttagaatatgcagaacaccaaggaaggatcaaaaatgcaagggaggcccacagtcagattgaaaagaggcgtcgggacaaaatgaacagttttattgacgaattggcttctttggtaccaacatgcaatgcgatgtcccggaagttagataaactcaccgtgctcaggatggctgttcagcacatgaaaacattgagaggtgccaccaacccatacacagaagcaaactacaagccaacatctctatccgatgacgaactgaaacacctaattctcagggcagcagatggatttttgtttgtcgtaggatgtgaccgagggaagatcctctttgtctccgaatctgtcttcaagatcctcaattatagccagaatgaccttattggccagagtttgttcgactacctgcatccaaaagatattgccaaagttaaggaacagctatcttcctcggacactgcacctcgggagcgactcatcgatgcgaagactggacttccggttaaaacggatataacccctgggccctcccgattgtgctctggagctcggcgctctttcttctgtaggatgaagtgcaacaggccttcagtaaaggtggaagataaggacttcgcctccacctgttcaaagaaaaaagcagatcgaaagagcttctgcacaatccacagcacaggctacttgaaaagctggccacccacaaagatggggctggacgaagacagtgaaccagacaatgagggctgcaatctgagctgcctcgttgcaatcgggcgactgcactcacacatggttccacagccagtgaacggggaaatacgggtgaagtctatggagtatgtgtctcgacatgcaatagatgggaaatttgtttttgtagatcagagggcgacggctattttggcatatctaccacaggaacttctaggtacatcgtgttatgagtattttcatcaagatgatataggacaccttgcggaatgtcacaggcaagttttacagacaagagaaaagatcacgactaattgctataagtttaagatcaaagatggttcctttatcacactacgaagtcgatggttcagtttcatgaacccgtggaccaaggaagtagaatacattgtctcaaccaacactgttgttttagccaatgtcctggaaggcggggacccaaccttcccacagctcacagcatccccccacagcatggacagcatgctgccctctggagaaggtggcccaaagaggactcatcccactgttccaggcattccagggggaaccagagctggagcaggaaaaataggtcgaatgattgccgaggaaatcatgggaatccacaggataagagggtcatcaccttccagctgtggctccagcccactgaacatcacaagtacgcctccccctgatgcttcctctccaggaggcaagaagattctaaatggagggactccagacattccttccgctggcctactaccagggcaggctcaggagaccccaggctatccctactctgatagttcgtctattcttggtgagaacccccacataggcatcgacatgatagacaacgaccaaggatcaagcagccccagtaacgacgaggcagcaatggctgtcaccatgagcctcttggaagcagatgcggggctgggtggtcccgttgactttagtgacttgccatggccactgtagacactacattttgctctggcaacagctacagtatcaaagtgcattactggtgaagttttacagtctgtgaagcttactggatagggagagaacagcttttatgtactgactccataaaagccatctcagagccattgagacaagtcaatcttaccatgtgtaacttcagacaaagtggaactaagcctg

SEQ ID NO: 42 - DNA, 2454 bp, Rattus norvegicus
gacggaggcagctgaatgtggtgctgaaccaacaacatctagctacaaggggagccactcctccacccagcgactgtgactgttctcacaggtctgaatttcctgttggtattcacaaagatgctttttatttttaacttcttgttttccccacttccgaccccggccctgatctgcctcctgacatttggaacggctatcttcctgtggctgatcaacagacctcagccagtcttacctctcattgacttggacaaccagtctgtagggattgagggaggagcacggagaggcgctttccagaagaacaatgacctaatcctttattacttctcagacgccaagacgttgtatgaagttttccaaagaggacttgctgtgtctgacaatggaccttgcttgggatacagaaagccgaaccagccctacaagtggatatcctacaagcaggtgtctgatcgagcagagtacctgggctcctgtcttttgcataaaggatacaagccatcgcaggaccaatttattggcatctttgctcaaaataggccagagtgggtcatctccgagttagcctgttacacatattccatggtagctgtccccctgtatgacacactgggagcagaagccatcatctatgtcatcaacagagctgatatctccgtggtgatctgtgatacaccccaaaaagcaacaatgctgatagaaaatgtggaaaaggaccttaccccaggcctgaagacagtcatcctcatggaccctttcgatgatgacctgatgaaacgaggagagaagtgtggcattgagatgttgtctctgcatgatgctgagaatctaggcaaagagaacttcaaaaaaccaatgcctccgaacccagaggatctaagtgttatctgtttcaccagtggaactacaggtgaccccaaaggagctatgctgacccatcaaaatatcgtttcaaacatggctgctttcctcaaatttctggagcctatcttccagcccacccccgaggatgtgaccatatcctaccttcccttggcccatatgtttgagaggcttgtccagggtgtcatattttcctgtggaggcaaaattgggttcttccaaggagatatccggttgctacctgatgacatgaaggctttgaaacccacagtgtttcccacagtgcctcgactccttaacagggtctatgataaggtacaaaatgaagccaagacacctttgaaaaagttcttattgaacttggctatcatcagcaaattcaacgaagtgagaaatggcatcattcggcggaacagtttgtgggacaagctcgtgttttcaaagatccaaagcagcctgggtgggaaggttcgtctcatgatcactggagccgcccctatctccactccagtcttgacgttcttcagggctgcaatgggatgctgggtgtttgaagcttacggccaaacagaatgcacagctgggtgttccattacatcacctggggactggacagcaggtcatgttgggactccggtgtcctgcaattttgtcaagctggaagatgtggctgacatgaactacttttcagtaaacaacgaaggcgagatctgcatcaaaggcaacaatgtgttcaaaggctacctaaaggacccagagaagacacaggaagtactggacaaggatggctggcttcacactggggacatcggtcgctggcttccaaatggaactctgaaaatcattgaccggaagaagaatattttcaaattggcacaaggagaatacatcgctccagagaagattgaaaatgtttattccaggagcagaccaatattgcaagtttttgtccatggggagagcttacggtcattcctgataggagtggtggttcctgacccagagtcacttccctcatttgcagccaagatcggggtaaagggatcctttgaagaactatgccaaaaccagtgtgtaaagaaagccattttagaagatttgcagaaagttgggaaagaaggtggccttaaatcctttgagcaggtcaagagcatctttgtgcatccggagccgttctcaattgaaaacgggcttctgacaccgacactgaaagccaaacgagtggagcttgccaagttcttccagacacaaatcaagagcctctatgagagcatcgaagagtaacttaaggttgctgagctggaagcggtgggggacgaagcggaaactatgtccagcgaacttttccagtaaatgaagcaatcactaaaggactgtcctgagttgggagcaaagcaacgtggacgagctcgatgtgacgcctgcactgcaggcgtcttctgtgatggaagctctggatctttctccttggacttcagtccctgcagtattttgctgccagatagcatgtggtgcctctacctgtaaatgtcagatctttgaaataaactattacagctcgtgccg

SEQ ID NO: 43 - DNA, 2440 bp, Rattus norvegicus
agcagtcgagctggagctgagccatagtcaaggactcattgtgggtgcccatcatgatgtcctacagcgagagattggggggaccggctgtctccccacttccagtccgtgggagacacatggtgcatggggcagcctttgcttatgtccccagcccacaagtcctgcacaggattcctgggacaaccacctatgccatctccagtctgagcccggtagccctcacagagcacagctgtccctatggggaggtcctggaatgtcatgacccgctccctgccaagctggcccaggaagaggagcaaaagccagagcccaggctgtcccagaagcttgcccaggttggcacaaagctcctgaaggtgccgttgatgctaggcttcctttacctctttgtctgctccctggacgtgctcagctctgccttccaactggccggagggaaagtggctggggacatcttcaaggacaatgccatcctgtccaacccagtggcagggctggtggtgggaatcctggtgacagttctggtgcagagctccagcacctcgacatccatcattgtcagcatggtctcctctggcttgttggaggtgagctccgccattccgataatcatgggctccaacatcgggacctctgtcaccaacaccattgtggccctgatgcaggcgggggacaggactgacttcaggcgggcttttgcaggggcaacagtgcatgactgctttaactggctgtctgttctggtcctgctgcccctggaggctgccacgggctacctgcaccacgtcaccgggcttgtggttgcctccttcaacatccgtggtggccgtgatgcccctgaccttctcaaggttatcacagagcccttcacaaagcttatcatccagctggacaagtctgtgattaccagcattgccgtgggggatgagtccctgaggaatcacagtctcattcggatttggtgtcaaccagagacaaaagaggcttccacttctatgtccagggtagaggccattggcagccttgcaaacaccaccatggagaaatgcaaccatatcttcgtggatactgggctgcccgacctggccgtggggctcattctgctggcgggctccctggtggtcctgtgcacttgtcttatcctcctcgtcaagatgctcaactctctgctgaagggccaagtggccaatgtcatccagaaggtcatcaacacagacttcccagcccccttcacttgggtcacaggctactttgccatggtggtgggcgccagcatgacgtttgttgtccagagcagttccgtgttcacctcagccatcactccgctcattggcctgggtgtgatcagtattgagcgggcctaccctctcaccctgggctccaacattggtaccaccactacagccatcctggcagcactggccagccccagggagaagctctccagctcctttcagattgccctctgccacttcttcttcaacatctcgggcatcctcctgtggtacccgctgccctgcacacgtctgcccatccgcatggccaaggcactgggcaaacgcactgccaagtaccgctggtttgccgtcctctacctcctcgtgtgcttcctgctcctgccctcactggtgtttggcatttctatggcaggctggcaggctatggtcggtgtgggcacaccctttggggccctgctcgccttcgtggtgcttgttaacgtcctgcagagtcgaagtcccgggcacctccccaagtggctgcagacatgggacttcctaccccgctggatgcactctctgcagcccctggatggccttatcacaagagccaccttgtgctatgccaggcccgagccccgttcaccccaacttccccccagagtcttcctggaggagcttcctcctgccacgccctctccccgcctggcactgcccgctcaccacaatgccacccggctctaggctgcaggtccagactattgcctggaggcgagggacgggatttttacagagcccacagtagaaaggcacagcatgtttgtgagtgtgtgtgcatgcatgtagatgcatgtcacttgaggtacatgattttgtgccacccttgggtacctgtccctactcagggccacagcggggtgggctttttttgcaattaagaagcagtgtgcacaaattacatgctaggtcctgagcctttgtggccatcaggacaggagtatgcgagtgcatggtgtgggtacaggggatgcagatgcatgaggagcccccaaaattttctgggaagagtcggctatgccctctcaccttctcactacccttgtcccaacaggagaggcagaagagcagctggccttctgtatacatgagcctttcctctgccaattctgctaactgtgcatagaaaaagttttaaaagttgcatctgtcctgatcat

SEQ ID NO: 44 - DNA, 1166 bp, Rattus norvegicus
gactcattgtgggtgcccatcatgatgtcctacagcgagagattggggggaccggctgtctccccacttccagtccgtgggagacacatggtgcatggggcagcctttgcttatgtccccagcccacaagtcctgcacaggattcctgggacaaccacctatgccatctccagtctgagcccggtagccctcacagagcacagctgtccctatggggaggtcctggaatgtcatgacccgctccctgccaagctggcccaggaagaggagcaaaagccagagcccaggctgtcccagaagcttgcccaggttggcacaaagctcctgaaggtgccgttgatgctaggcttcctttacctctttgtctgctccctggacgtgctcagctctgccttccaactggccggagggaaagtggctggggacatcttcaaggacaatgccatcctgtccaacccagtggcagggctggtggtgggaatcctggtgacagttctggtgcagagctccagcacctcgacatccatcattgtcagcatggttccctctggcttgttggaggttttttttttttttttactttatccgcatttatttatgctgaatttattcccgtgccatgagcttttgtttcttcaatttcttctgggatatctttttcttctgtgcaacctcctcttctggctttggaacaatctgttccttctcagtgaggatcatctcgatgtggcagggggagctcatgtatgggttaatccggccgtgagctctgtaggttcgtctgcgcatcttaggagccttgttcacctggatgtgttcaatgaccagagagtctacatccaaacccttaagttcagcattactctctgcatttttaagcatgtgcagcaaaaattcagcactcttttttggccaccgtccctgtgtccagccccactgtttggcctgggcgcacctaccgactccaccattataccgccggaatggcacacactgcttctttaaagtgacatccttcagatacttggtggctttgcggatatgcatacccttgatggcctgggcagtttcccgggtgttcttaaagtgaacacgaaggtttgagcctcttgacttgcatgatttcgtggggttttctgggtcaagggagtagcgaaccaggatcc

SEQ ID NO: 45 - DNA, 1509 bp, Rattus norvegicus
agctgacagaacttgggcacagcggcagacacaagatgggctctaagtacccaaggtccctccgctgctgcctgcccctgtgggccttcgggctacaggtgacttttatcctcctcttctattttctcatcggccaagaccctatccaggcagatcacaagttcatggcgatctatcaagtcatccaggatttgacccttgtggcagccttgggtttcggcttcctgtcctcatcctttcggagacacggctggagcagtgtggccttcagcttcttcatgttggcccttggggtacaggggacaatcttgctggactatttcctgaattgggtcctcgactggaacatgatcaagaatccgttcagtccgtttctcagcatccagagagctaccataagcaccttaccgctgctgatctcagcgggcgctgtcttggggaaggtcaacttggtgcagctggccgtgatggtgctggtggaagctatgacctttggtgccatcagagtcgctgacaagaaggtcttcagaattgaagaccacataatcatgatgtacggacacgtgtttggggcctattttgggctgactgtggcatggtggctttccaagtctctgcccaggagaaggcatgagaacgcccagacagaaaaggttcagatgaccacgagctccagtctgtttgccatgctgggcaccctcttcttgtggatattctggccaagtatcaactctgctctcctggaagggacaaagaaaaagaacgcagtgttcaacacctactacgccctggcagtcagcacagtgacagccacctccatgtccgccctgagtcaccccaaagggaagatcaacatggttcacatccacaacgcagtgctggctgggggtgtggctgtcggtgccccgagttgcctgatttcttctccttggattgctatggtcctgggcctcacagctgggttgatctccatctggggagccaagtgtccacaggtgtgtttgagcgacttgctgctgaaccccagtgggatccactacaccttcggcttgcccggcctgctcggagcactcacctactactgcctccatataatagccgagtccaggccctccaatctctggattgtcacccaaacgatcactgacgtcggggctctcagctttgctatggcgatgggaatggtgactggactgctgacaggttgtctcctaagtgtcaaagtgtggagggctccccatgcagtcaagtactttgatgatcaggctttctgggagttcccccacttggctgtcgaattttaagcaaatccatctgagaacgaggctgagcacggcgagccctccgttcaccttccatttgtctgcatcatgtgttacaagaaaggcttccgagtgatggtcgaagtttaaatatgttcgctttcatgacagatacgatcaatacttttggctgaagacacctcattaaagttctggtctaattctacgcaaaaaaaaaaaaaaaaaa

SEQ ID NO: 46 - DNA, 1685 bp, Rattus norvegicus
ggaaagatcaggggtggagcgcattgcctagcgcctgcgtcttgcgggcgagcgcgctagcggtcggcggcgttgctggcgggagagactgcaacgcctatgtctgaggagcgatgccgagagaaatcatcaccctacagttgggccagtgcggcaatcagattgggttcgagttctggaaacagctatgtgctgagcatggcatcagccccgagggcatcgtagaggagttcgccaccgagggcactgaccgcaaggacgtctttttctaccaggcagacgatgagcattacatcccccgggctgtgctgctggacctggagccccgggtgatccattccatcctcaactcctcctatgccaagctctacaacccagagaacatctacctgtccgagcatggaggaggggctggcaacaactgggccagcggattctcccagggagaaaaaatccacgaggacatttttgacatcattgatcgggaggcagatggcagtgacagcctagagggatttgtactgtgtcactccattgctggggggacaggctctggcttgggctcctacctcttggaacggctaaatgacaggtaccccaaaaaactagtgcagacgtactccgtgttccccaaccaggacgagatgagtgacgtggtggtccagccctacaactccctcctcacgttaaagaggctgacccagaacgcggactgtgtggtggtgctggacaacacggccctgaacctgatcgccacagaccgcctgcacatccagaacccatccttctcccagatcaaccagctggtgtccaccatcatgtcagccagcaccaccaccctgcgctaccccggatacatgaacaacgacctcatcggcctcatcgcctcactcattcccacccctcgactacacttcctcatgactggctatacccccctcaccacggaccagtcagtggccagtgtgaggaagacaacagtcctggatgtcatgaggagactgctacagcccaagaacgtgatggtgtccacaggtcgggatcgtcagaccaaccactgctacatcgccatcctcaacatcatccagggagaggtggaccccacccaggtccacaagagcctgcagaggatccgggagaggaagttggccaactttatcccctggggcccggccagcatccaggtggccctgtcaaggaagtctccctacctgccctcagcccaccgggtcagcgggctcatgatggccaaccacaccagtatctcctcgctttttgaaaggacctgtcgccagtttgacaagctgaggaaacgggaggccttcatggagcagttccgcaaggaggacatcttcaaggacaattttgacgagatggacacctccagggagattgtgcagcagctgattgacgagtaccatgcggccacacggccagactacatctcctggggcacccaggagcaatgagtcgcccgagacagggaccctcatctgccttaccggttagcccaggccctgcctggctgactacccctcagagcacagatcagggacctcatcaatcactcgcatacacatgcactgtctgttggcttaggggcgggtttacttctttgagagtatttatctttaataaagcactggatgtaaaccgagaaaaaaaaaaaaaaaaaaaaaaaaaaa

SEQ ID NO: 47 - DNA, 3061 bp, Rattus norvegicus
tgtgaccgcggccaagcccgctcgccttctgcggcgagtagggcctcgcggcgtcatcggcggcgaggagccgctgcggcctggccgaccatgtcggacgcggctgaggagcagcccatggagacgacgggcgccaccgagaacggacacgaggccgcccccgaaggcgaggccccggtcgagcctagccctggcagcggccccgcgactccggcggggtctgtgggcgggaccacggccgccccgagcgggaaccagaacggcgccgaaggcgaccagatcaacgccagcaagaacgaggaggacgcgggaaaaatgttcgttggtggtctgagctgggataccagcaaaaaagatctaaaggattattttactaagtttggagaggtcgttgactgtacaataaaaatggatccgaacactggtcgatcaagagggtttgggtttattctcttcaaagattcttctagtgtggagaaggtcttagatcagaaggagcacagactggatggtcgtgtcattgaccctaaaaaggctatggctatgaagaaggaccctgtgaagaaaatctttgtgggaggtctaaaccctgaagccacagaggaaaagatcagagaatactttggccagtttggggagattgaggccattgaacttccaatagatcccaagttgaacaaaagacggggttttgtttttattacatttaaagaggaagaccctgtgaagaaagttctggagaaaaaattccatactgtcagtggtagcaagtgtgaaatcaaggttgcccagcccaaagaggtgtaccagcaacagcagtatggctctgggggccgaggaaatcgcaatcgagggaaccgaggcagtggtggaggtcagagtcagagttggaatcagggctacggcaactactggaaccagggctacggctaccagcagggctacgggccgggctatggcggctacgactactcgccctatggctattacggctacggccccggctacgactacagtcagggtagtacaaattacgggaagagccagcgacgtggtggtcatcagaataactacaagccatactgagaggcagcaggagcggccgagtgacgacgcacacgctttgtttggacgcggagtgaacacaattatgtaccaaatttaacttggcaaacttttatggcctgtcccatgtgcatcttatttaaaatttcccccggaaatcactctcctgtttactattccagagctctagttgttgtaggcagcgtgtggcgtctcagaggtcagagcggcattagggggctgattttattaccaggttaccctgttctagattggagggtctgcttcctgctgccgctctgcagcctggacctgtggaccctggttgtaaagagtaaactgtatcttaggaaaccagtgtcacctttttcaccttttaattttatattatttgtgtcatacatttccagtaatggaagtgttaattttactgtactttttggtaccttttgggaatctaatgtattgtaaggtattttacacgtgtcctgattttgccacgacctggatattgaagctatccaagcttttgaaataaaaatccctgagagtctggtccactaactccagggactgtgggacagaggaacaaacaagaaagaactcgaggcctcgctgagtggcacgcttgctgagtgctgccacatcccgcaagctgagcaggtatcccaactctgttcctgcccggtagaccacccgaggtgtgagtgtggtcttgtcttccagattcgtaggacagaagctccaggaggaggacccgcccaacatggcatcggagagcgggaagctatggggtggccgatttgcaggctcggtcgaccccaccatggacaagttcaactcatctatcgcctatgaccggcatctgtggaatgtggacctgcagggaagcaaggcctacagcaggggcctggagaaggcagggcttcttcaccaaagctgagatgcagcagatactgcaaggcctggacaaggtggctgaagagtgggcccaaggcatcttcaaattgtaccctaatgatgaagacatccaccttcctcaaggtgctcattgaagccatggtagaccgggcagaggcggagtgtgaagtcctcttccctgggtacacacacttgcagagagctcagcccatccgctggagccactggatcctgagtcacgccgttgcgctgacacgagatttagagagactgaaggaggtgcagaagcggatcaatgtcctgccactgggcagtggggccattgcaggcaaccctctaggtgtggaccgggagttcctctgtgcagaactgaactttggagccattacgctcaacagtatggatgccaccagcgagagagacttcgtggctgagttcctgttttgggcttctctgtgcatgacccatctcagcaggatggcagaagacctgattctctacggtaccaaggaattcaactttgtgcagctctccgatgcctacagcaccggaagcagcttgatgccccagaagaaaaacccagacagcttggagctgatccggagcaaggcgggccgagtgtttgaagtgtctgataccatgacagctgtcctccaagtagccactggagtcatctctacactgcagattcatcgtgagaacatggcacaggcactcagccctgacatgctggctaccgaccttgcctactacctggtccgcaaagggatgccattccgccagcccacgaggcctcagggaaagctgtggtcgtggcagagatgaaaggggtggctctcaaccagctgtcacttcaggagatgcagaccgtcagtcccctgttctcgagtgacgtgaatctcgtgtgggactacagccacagcgtggagcagtacacagccttgggtggcacagcacagtccagtgttgagtggcagatcagccaggtgcgggccctgctgcagatgtagcagccctagattccacccagtcaaagctgcgccccaataaagtggagccctggagaggccgccat

SEQ ID NO: 48 - DNA, 3624 bp, Rattus norvegicus
ctgcagtctctgtgcccgttcacctgtcccagttccttttgggtctgggtatctgtccattgataattgttggtgttccaaaagtaaaactttaaaatgttttaaaaaatggcattaatgtagtttaaaaccttatttatttacatttatttattatttattgtatatgtatatgatcacacaagcgccaagtgcatatgtagccagcagcagacgactgtcaaaagccagttctctcctcccatcaggtcctgaggactgaacttgtgttcttgggctttacccaccaagccatttgctggcccctaatttaaagtagtactcatttgctagtgtagctaaggggcttcagaagctgtttaaaggggatcgtgagttcgagagggcctaagctgcacactgaggcttcgtctcaaacacaaacaaatctagcttaatgggaaaagggacactgccttccactttcgcacacaccagcagacagaacgtaagtagggtggtagacctttggtctattgcaatagcagatgttgcagatcaatgaaaaacctgtagtactctcataagaaagagggtacaaaaggttgatgaaaatctgtctctttaggagagtgaatgggggcttcctgtatgctaggtaggcaatttaccacttagccacgcccccagcccctccctggggattctaggcaggggctctaccactgagccacctccctagtccttctagaagttattttgtgacactatccaaataagttattcaagtggtctctggaagtctctctgaagcttaggcgggtcttgaacttgtatcattagccacccacatagctgtaccaccacacctgggtagaactgatacttcagtgtgattttgaaaatgcccttgcttggcactggtagcacagcctttaatcccagcacagcctttaatccttgtgaggcagaagcagacgatctaggtgagaccctgtctgcctcgaaaatacagaaagtcaaaaacaaaacaaacaaaaacaaaaagggaaaaaagaaaagggaaattaatctagtggataccctaaaaagaatctaagattaatgagtgcatttttaagactttttttaagttttactcttgaatacaataattatcaatagacagggtatcttagactatctacagttggaaaactgtgttccaatatgaccctgaagtataagaaggagacacagccctagagtgcaagcaggggacaggacatgggcaagtagctacctcggaagcgacttattgatggacgggactcatggaaaaggttaggcaagcaggtgggctggatattccagcccaacctgtattacccagactgttgcaagatggcagacagatcaggaattcaaagtcacccctggattacatagtgagtttgaggctagcttggactagatgagactatctgtaaactcatccggagctcctttgctgagcggtagagtgcgagcccactgatgtatctgtctctctccctccaggtgtattctccagtgaatcctgtgcccaccatggcccctctcaactcctacatgtccttgaaccctcttagctctccctaccctcccggagggcttcaggcctcccctctgcctacaggacccctggcacccccagcccccaccgctcccctggggcccaccttcccaggcctgggcgcaggcagcggcaccggaggcagtgcttccgggtatggcgccccagggcccgggcttgtacacggaaaggaaatggccaaggggtaccggcggccactgactcatgccaaaccaccttattcctacatctctctcatcaccatggctatccagcaggcaccaggcaagatgctgaccctgagtgaaatctaccaatggatcatggacctcttcccgtactaccgggagaaccagcaacgttggcagaactccatccggcactcgctgtccttcaatgactgcttcgtcaaggtggcacgctccccagacaaaccgggcaaaggctcctactgggccttgcatcccagctctgggaacatgtttgagaacggctgctatctccgccgtcagaagcgcttcaagctggaggagaaggcaaagaaaggaaacagtgccacatccgccaccaggaatggaacagtggggtcagccacctctgccaccactacagctgccactgcagtcacttccccggctcagccccagcctacgccgccgtctgagcccgaggcccagagtggggaagatgtggggggtctggactgcgcctcgcctccttcatccgcaccctatttcactggcctggagctcccaggggaactgaagttggatgcgccctacaacttcaaccaccctttctctatcaacaacctgatgtcagaacagacatcaacaccttccaaactagatgtggggtttgggggctacggtgctgagagtggggaacctggggtctactaccagagcctctattcccgctctctgctcaatgcatcctagcggcgcaactgggagaaatgcggtgatgggggtttgctgtgacagatgaccggttcttcggccctgatctttctggttacactctgcttatccagttaattaacatcgtatttggtctattactgtgatatgacccattggctactgtggtaactgcatggactcttcggtgggcctagggttggggtattgtgaaggcagatgcatttgggagtgttacgaaggtggccatgtcggacataccgtgaaggcaattagactggtgtactataaaagctgcatgttaagtgagtgatccactgggtgcctgatggccgcgatgtcggaggacatattgtttggccctttggatgctgcgatggacatcttgaattgaccttttgaatgtgtgacagtcacaccgtgtcagccacatcttctttggcccattgtatccagggatcaccttttttttttttttttcttttttggcagacttcttggtacagcagataccaagttgaccaccatgtcttttttttgacattctggatgcatggaaggtcaccttattgacaaggtgacatctcgacatgctgttatgcaccaagttggtgaccacaggcctgctgtcaccatctccttggtggggttggatgagggtagaggtgagcagaccctgtgacttctctgaaggccatccccacccctgcccatgagaagggctagtgtgggtgtagggggttccctactgacgtcaagttcttgtatggggcttggggtactgcctgtgtttgaccattaaaacggcaccgtctccgtctcctggtgtcttttttcttggcggaccctgtgaggctcaaacacctaaatgtgtgttcccctgtgcccttcttcatatcccagggagctggtggcctctgtgggggaagggctgggggggggggggaggcagcaatgtgacctttggctctttgttgtccctgaccccaaggacagtttgttcatagatagaagcccccgcagtagtggggccagagcatccagggaggaggtggctttgcagtgaccaaggccatcgcccctcccccaccttgcagacacacacacaccccacacacacatacctgg

SEQ ID NO: 49 - DNA, 4950 bp, Rattus norvegicus
ctgggagcatctaggtgctactcgagccgcaagggcgcatcgtacgatccccccggctcttcggtccctcggtggggatagcacctggagatagccccggacggggatggtcagcggctgcggccgtctgacacacgagcgggacacggcgagggcaccatggcgctaacgccccagcgcgggtcctcttcggggttgagccgaccagagctgtggctgctgctatgggcagccgcgtggcgcctgggggccacggcgtgccccgccctctgcacctgcaccggcactacagtggactgccacggcacgggtttgcaggccatccccaagaacatcccacggaacaccgagcgcctggaactcaatggtaacaatatcactcggatccataagaatgactttgctgggctcaagcagcttcgagtgttgcagctgatggagaaccagattggagctgtggaacggggagcttttgatgacatgaaggagttggagcggctacgactgaaccgcaaccagctgcaagtgttgcctgaactactgttccagaacaaccaggctctgtccagactggacctgagtgagaattctctccaggctgtgcccagaaaggctttccgaggagccacagacctcaaaaatctacagctggacaagaaccagatcagctgcatcgaggaaggggccttccgtgccctacggggactggaggttctgaccctgaacaacaacaacatcaccaccatccctgtgtccagtttcaaccatatgcccaagcttcggaccttccggctgcactccaaccacctgttctgtgactgtcacctggcctggctctcgcagtggctgagacagaggcccaccatcgggctcttcacccagtgctctgggcccgccagccttcggggcctcaatgtggcagaggtgcaaaagagtgagttcagctgctcaggccagggggaggctgcacaagtacctgcctgcaccctctcatccggttcctgcccagccatgtgcagctgtagcaatggcatcgtggactgccgtggcaaaggcctcactgccatccctgctaaccttccggagacgatgaccgagatccgcctggagctgaacggtatcaaatccatcccaccaggagccttctctccctacagaaagctgcgcaggatagacctgagtaacaaccagattgctgagattgcacccgatgccttccaaggcctccgctccttgaattccctggtcctctatggcaacaagatcacagacttgccccgaggtgtatttggaggcctgtacaccctccagctgctgcttctgaatgccaacaagatcaactgcatccggcctgatgccttccaggacctgcagaacctctctctgctctccctatatgacaacaagatccagagtctcgccaagggcaccttcacctccctgcgggccatccagacactgcatctggcccagaaccctttcatctgtgactgtaacctcaagtggctggcagacttcttacgtaccaaccccattgagacaactggggcccgctgtgccagcccccggcgccttgccaacaagcgtatcgggcagatcaaaagcaagaagttccggtgctcagccaaagagcagtacttcattccagggacggaggattaccacctgaacagcgagtgtacgagtgacgtggcctgtccccacaagtgccgctgtgaggccagtgtggtggagtgctctggcctgaagctctctaagatccctgagcgaatcccccagtccacgactgagctacgactgaacaacaatgagatttcaatcctagaggccactgggttgtttaagaagctctcacatctgaagaaaataaacctgagcaacaacaaggtgtcagagattgaagacgggacgtttgaaggcgccacctccgtcagcgagctgcacctgaccgccaaccagctggagtctgtcagaagcggcatgttccggggtctagatggcttgcggaccctgatgctgaggaacaaccgtatcagctgcatccacaatgacagcttcactgggctgcgtaacgtgcggctcctgtctctttacgacaaccacatcaccaccatctcccctggagccttcgacaccctccaggccctgtccacactaaacctcctggccaacccattcaactgcaactgccagttggcctggctgggggactggcttcggaagaggaaaattgtgacagggaaccctcgctgtcagaacccagacttcctgcggcagattcctctgcaagatgtggccttccctgacttcaggtgtgaggaaggccaggaggaggtgggctgcctgccccgcccacagtgcccccaagagtgcgcctgcctggacaccgtggtccggtgtagcaacaagcacctccaggctctgcccaagggcatccccaagaatgtcacagaactctacttggatgggaaccagttcacactggttccgggacagctgtctaccttcaagtatctgcagcttgtcgacctgagcaacaacaagatcagctccttaagcaactcttccttcaccaacatgagtcagctgaccacactgatcctcagctacaacgccctccagtgcatcccccctctggccttccaaggacttcgttcactgcgcttgctgtctttgcatggcaatgatgtctccaccctccaagagggaatctttgcagacgtgacgtctctgtctcacctggccattggtgccaaccccctgtactgcgactgccacctccgatggctctccagctgggtgaagactggctacaaggaacctggcattgcccgctgtgctggacccccagagatggagggcaaactgttgctcaccacacctgccaagaagtttgaatgccaaggtccccccagcctggcggttcaggccaagtgtgatccctgcttgtccagcccatgccagaatcagggcacttgtcacaatgaccctcttgaggtatacaggtgtacctgccccagtggctacaagggccgaaactgtgaggtgtctctggacagctgttccagcaacccatgtggaaatgggggaacctgccatgcccaggagggcgaggatgctggcttcacgtgctcctgtccttccggctttgaagggctgacgtgtggaatgaacacagatgattgtgtgaagcacgactgtgtcaatgggggtgtctgtgtggatggcatagggaattacacatgtcagtgccccctgcagtacacaggaagggcctgtgaacagctagtggacttctgctctccggatctgaacccatgtcagcatgaggcccaatgtgttggcaccccagaggggcccaggtgtgagtgtgtgccaggctacacgggtgacaattgcagcaaaaaccaggacgactgcaaggaccaccagtgtcagaacggggctcagtgtgtggatgagatcaacagctacgcctgtctctgtgctgagggctacagcggacagctctgtgagatcccacctgcccccaggaactcctgtgaagggactgagtgccagaatggagccaactgtgtagaccagggcagccggcccgtatgccagtgcctaccaggctttggaggtcccgaatgtgagaagttgctcagtgtcaactttgtggaccgggacacttacctgcagttcactgacctgcagaactggcctcgggccaacatcactcttcaggtctccacagcagaggacaatgggatcctcctctacaatggggataatgaccacattgcagttgagctgtaccagggccatgtccgtgttagctacgacccaggcagctaccccagctctgctatctacagtgctgaaacaatcaacgatgggcagttccacacagttgagctggtgacctttgaccagatggtgaacctctccatcgatggtggcagccccatgaccatggacaactttggaaagcactacacactcaacagtgaggcccccctctatgtgggagggatgcccgtggatgtgaactcagctgccttccgcctgtggcagatcctcaatggcaccagcttccacggttgcatccggaatctatacatcaacaacgaactgcaggacttcaccaagacacagatgaagccgggcgtggtgcccggctgcgagccctgccgaaaactctactgtctacatggcatttgccagcccaacgccaccccagggcccgtgtgccactgcgaggctggctgggggggcctgcactgtgaccagccagtggacggcccctgccatggccacaagtgtgtccatgggaaatgcgtgcccctcgatgcacttgcctacagctgccaatgccaggatggatactcgggggctctgtgcaaccaggtcggggctgtggcagagccctgtgggggcttacagtgcctgcatggtcactgccaggcctcggccaccagaggggcacactgtgtgtgcagcccaggtttttcaggcgagctgtgtgagcaagagtccgagtgccggggggaccctgtccgggactttcaccgggtccagaggggctatgccatctgccagaccacgcgcccactgtcatgggtggaatgccggggcgcgtgcccgggccagggctgctgccagggcctgcggctgaagcggaggaagctcaccttcgagtgcagcgatgggacctcgtttgctgaggaggtggagaagcccaccaagtgcggctgtgccccgtgtgcgtaacgtgcgggtggcacactagcagctgggctggggcgggcatcaccaggatagcgcttgggtcctggtgggcgcggggacactgagctgcctttccagcggactgcactgccagggcagaggagcaaggcccgggttgccaagccctctcccaaagtgccttgcacagataggcgcttaataaatatttgttgaatg

SEQ ID NO: 50 - DNA, 1895 bp, Rattus norvegicus
tcccgggatcacgtgttgccgcaaggggctgaagcgcgcgtttctctgctctgcgacccggaccggccagtaaggagaaggtatcatgtcagacaacgaagacaatttcgatggcgatgactttgatgacgtggaggaggacgaagggcttgacgacttggaaaatgctgaggaggagggtcaggaaaatgttgagattctcccatctggtgaacgaccgcaggccaaccagaagcgtatcaccactccatacatgaccaagtacgagcgagcccgagtgctgggcacccgggctctccagattgcgatgtgtgccccagtaatggtggagctggagggggagacagaccctttgctcatcgccatgaaggaactcaaggcccggaagatccccatcatcattcgccgttacctgccagatggaagctatgaggattggggcgtggatgagctcatcatcagcgactgagcagagctgtcaggctgtgccaggcaccatctctatgcccattttatacataaaagaaggtaaccctggacacccacatagttggaaggaagaatggcttttgagtggctcagcctgacctctggcccactgcaactctcaggagacatggtgtgccacatgggattgggcaccctggtcagggtggaaggaggagtggccacagtaataggaggggtgcttgctgctctggataagggttaattctgggagtcatagacttcgcacccctaccaccctcctccaagcctttggaatcctttaatcaagttgggtgctgaaatttcagctctgaaatgccgcctttgtgctggcatccaggcagccgccccagagtgcgggggtcactttctcggccccatttctctaaatggtgtctttgttccctgctgggctgctcagtatcagatgtgattaagggagatgaagcttggatggggggggagttaacccttaggggatagggtgcagggagatgggagaagtgggtgcttttcctctgaccttcctctgaattctgctcttcttgggcagccccttgttgacctggcaggcctggggttgtctcctgtgggatatgttgtcacctgccaacattgtaaagtctcccatctccttaggtttatggtcatcttgtcagtcatttaaaaacacctgataccagagctgctgctatgccagagcacatcccagcctgtgttgaagggatgaacaacctaactggcttccatttcgtcttccccccatggccattttcctgcagcctacaccagtggtgatgacctgggcgatctcatgaggtagtgggtccctctatttttggggcccctccatcttgtcagctctgtttaaagttcccccttggagcaggagtcccatagactggaaatggaaacatgtcctgcttttcagtagagggacaagtaagggtccccatgaaaggctggtatgaggtcacttcgtatcttacagtgttggtgtcatagatggaaacctgcagccaggagtgggtcttaggagtcggtattgtcaaatcaaatgaaaaaatatagacttttatggtatctggtctggtaggtcaagagactgcctcagccctggttttacccagggagttggcaatctcctgacacctgtgatgggtgaaggacacattccacgtgtgaggaagagagctgatgtggaggggcactcagggtagtggctcccctttcacttatgagtgacttcagtgaagatactcagatgtgtaggtgtatttacttggaccccagctcacggaaggccagacaccaagatttagcagaggtggaggagtgggtcagattcaacagataatctattaaagatcaataaaacacaaaaaaaaaaaaaaaaaaaaaaaaaa

SEQ ID NO: 51 - DNA, 853 bp, Rattus norvegicus
ggccacgcgtcgactagtacggggggggggggggaatgaggcggaccatctgaccccgctcgctcgctccacgcgctggcacgggagcgacagccaactgcagagcgaattcctctcacgccagtcactcagagcaatgaaactgtaacagttgttttcccaaatactgtacgatggtacgactgaccagcaacttccttttgttttgtattatatatatctttaaaatatcttgtcagttttactatgtatgttcatccattcaccaaagccctcaaaaagaagtttctccacagaacaggcacctcaggctctgtcccaaggaatgtgttttaatttttgcccggataaaagaaaataagctttgcacacactctcgattctttatttgcaggcaaacttcactctttattatctgaaacttttccattctcagcctcttagaggcacagatggctcaagtttcagtggcaaaaaagtctttttttttttttctttctgtaaccaaactagagcaaatttggaattcagtctgggactaaaacgtcacagcagaaaaaaaatgaaaaaaaaataatttgctttttctttctttcatttagcagcataaataagtttggccactgggagtacagtacaggggttgggacaacgatcccgtatttgaagacctacttctagcaccagcatcaagaactaaatccacctcaggactcacagaacccaggacaacttgccatctttgagcaacatatgcattgaagagtgtatatagaagcaacagtaaatagattaacagaggctaatactgtgattgattgacattggcaatggttggcaaaaaaaaaaaaaa

SEQ ID NO: 52 - DNA, 3780 bp, Rattus norvegicus
gggcgacagcaatgtggcacatccctcctcggaagtgaagggacagaagcgtcctaggcctctccacccttgctgacggcttcgcgccaagggctgccatggccacggggttctcctttgggtccgggaccctcggctccaccactgtggcccccggcggcaccggcacaggcagcggattctccttcggcgcgtccagcacaccttctgtggggctcaacttcggaactctcggaagctctgcgacaccagcatctacatctacttctgccagtggttttggaacaggactctttggatctaagcctggcactggattcactctaggaggaacaagtgcaggaacaacagctactacatctgcatctacaacaggctttagtttaggattcagtaaacctgcagcatctgccacaccatttgccctgcccgtcacttctaccacagctagtggtcttactctctcgtctgctctgacatcagctccagcagcatccacaggatttacgttgaataacttgggagcaacaccagccacaactacagcagcatcaacaggactttccttagggggggccttagctggtttgggaggttcacttttccagagtggaaacacagcaacatcaggtctcggacagaatgctttaagcttgtctctggggactgcaacacctacttcagcagccagcagtgaaggccttggtggtatagattttagtacctcatcagataaaaagagtgataaaacgggaacaaggccagaggatagcaaagccctgaaagatgaaaaccttcctcctgtcatctgtcaggatgttgagaatctccagaaatttgtcaaggaacaaaaacaagtccaagaagaaattagtcgaatgtcttccaaagcaatgcttaaagtccaggaggacatcaaggccctgaagcagctcctgtcattggctgctagtgggttgcagaggaacacactcaatattgacaaactgaagttagaaactgctcaggagttaaagaatgcggaaatagctttaagaacccagaaaacaccacctggactccaacatgaaaatacagctcctgctgactacttcagagtcttggttcagcaatttgaggtacagcttcagcagtacaggcagcagattgaagaactagaaaaccatcttgccactcaagcaaacaattcacatataactccgcaagacttatcaatggctatgcagaaaatttatcaaacatttgtagctttagctgcacaacttcagtccattcatgaaaatgtcaaggtgcttaaagaacagtatctcagctacagaaaaatgtttttgggtgatgctggggatgtgtttgaagccaggagaacagaagccaagaagtggcagaatgcacccagagttactactggacccacgcctttcagcaccatgccaaacgcagcagccgttgccatggctgcaacacttacacagcagcaacagcctgctacagggccacagccgtctctgggagttagttttggaacgccattcggctcaggtattggcactggcttgcaatcaagtggcttaggttcttcaaaccttggaggatttggaactagctctggtttcggatgcggtaccacaggggcctccacatttggatttggaacaacagataaaccctcaggaagtcttagtgcaggctttggcagctcaagtacgtctgggtttaacttcagcaatcctggcatcacggcatcagctggtttgacatttggggtgtccaatcctgcgtctgcggggtttggaacaggaggacaactccttcagttgaagagacctcccgctggaaacaaaagaggaaagagatgaacctatgggtcgaggtgttggccgtgcttagctggcgccgctcattctatgattctatttttctaatgatgtagtgattgagctgcatctcgggagatttataatgttttgatattcctcactctggaacttgaactttgtttgtttaccttaccagacatccttcttgtgaactcaaaatccagttgcagttctgttgctattacttttgactccatgtaagaaatgttgtgattaaattaccaagtgatagtggtgggaaaaacaattcatcaacctaaacctatgatttttcctagtattaatagcaatttttttgttgctggggtttaagctgtgaatacatgcacattggtttcttatgcagatggtttgaactctcaggcctgtgctagaagtagtttgttccttgacaaggcctttggaactgtgctgcagggcatcttgtagatatgtatgtaattatatatagagaaatgcacacagtgtgtgcacataaaatatatttacacacctacaactcttgcctcagactgttatccttttctagtgtatttagttattcactctttatgctttaggtcctcagcgcttataaaaggagtaacttagggtacctggtcacttcgtttgttaattagacagaagtgattcttgataaagtatttaacccattcaaattcattgactccactcctgtttttatttattccttgacccttatctacgaggaatggtctaaggcgcatcaaacagattttagaaacctttattaccctatgtatatattctcgtgctacaactatggaatcttttgtaaggagattgtcttttaggagtgtacgtgaactccagactgatgctctggggcaaagagctactaagccaaattgaatctatgcaggtgaaggatgcaatgttaattcagtaagaacttgtttagctgtttcaatacagaattcttcttatagggctatggagaaaccaaatgaagtggcttctaagcctcttaatgtgctgagtcttaatctggactagagaaactacattttaggaaaactctttgtaccaactatgaacttgctggtttgaagagtgagtggagctccagtgagtgccacggagttgtgtcaggttgtgtctgtgacctctgtctgtgctgccattcttggtgtttcgtgagtgaacatccactgtgaagggaattgccttaggaccatgtcagcgagaaagtagtcttcaggtgggatgaacacatggaattgcacggaaatagtttaattttttacatagaaagttttgtatataatgttcatcagtgaatattttcaggatcattttcaccaaggcaccttttctttctaaaataggtgtggtatacatacatacatatacacatatatatttttagtataatgtcacttgtgtttgactataaaagcattgtggttctgttttatttatctgcatataacagtgattggcattcctgaattcaatatttgcatcttgatgcattaaaataaggagagttatttgtctttgagcactaaacctgtttttatttgtatattttgtaattctgcagccctcggtccagattatgggggaggataggaaagggtgtgctttggcatttgaagttactatcagagttacatatgccattacaaaacactgctttgttagtttcttaaatacggtgtattatgctgcaaatagctgagtatttatatttctctgggttacttttttctttatatacattttcatatgttgaaccactggagacttgtaacattcatttgtggtaggagtcagagtgttgtctttgtctcctttgtctttgccttgtctattatggaaataataaaattgtgttagttgctttgaaaaaaaaaaaaaaaaaaaaaaaaaaaaaaaa

SEQ ID NO: 53 - DNA, 1134 bp, Rattus norvegicus
atggcgaactcggcaaacacaaacaccgtgcctaaattgtatagatctgtgattgaagatgttattaatgatgtccgagacatttttctggatgatggagtggatgaacaggtcctgatggaactaaaaactttgtgggagaataaactaatgcagtctagggcagtagatggatttcattcagaagaacagcagcttttgttgcaagttcagcagcagcaccagccccagcagcagcagcatcaccaccaccaccaccaccagcaggcgcaacctcagcaaacggtacctcagcaagcacagacccagcaggttcttattcctgcgtcacagcaagctacagcaccacaagttattgttcctgattctaagttgatacaacatatgaatgcatcaagtattacgagtgctgctgctacagctgctaccttggcgctccctgcaggcgtgactcctgttcagcagatactaacaaattcaggccagctgcttcaggtagtcagagcagccaatggtgcccaatatatctttcagcctcagcagtcagttgttctacaacaacaagttataccacaaatgcagcctggtggagtacaagcgcctgttatccagcaggtcctagccccacttcctggagggatttcaccacagaccggtgtcatcatccagccacagcaaatcttatttacagggaataagactcaggtcattcctacgacagtggcagcgcccacaccagcacaagcacagatccctgcagctggacagcagcagccacaggcccagcctgctcagcagcaggctccattggtgctgcaagttgacggaacaggggacacatcttctgaggaagatgaagacgaagaagaagactatgatgatgatgaagaggaagataaagagaaagatggagccgaagatgggcaggtggaagaagagcccctcaacagcgaagatgatgtaagtgatgaggaagggcaggaactctttgacacagaaaatgttgttgtatgccagtatgataagatacacagaagtaaaaataaatggaaatttcatctcaaggatggcattatgaatcttaatggaagagattatatattttccaaagccattggagatgcagagtggtga

SEQ ID NO: 54 - DNA, 1015 bp, Rattus norvegicus
atgggaaccccaaagcagccctcgctggctcctgcacacgccctaggcttgaggaagtccgatcccggaatccggagcctggggagcgacgcgggaggaaggcggtggagaccagcagcccagagtatgttccagatcccagagtttgagccgagtgagcaggaagacgctagtactacagataggggcctgggccctagcctcactgaggaccagccaggtccctacctggccccaggtctcctggggagcatcgttcagcagcagccgggacaggcagccaataacagtcatcatggaggcgctgggactatggagacccggagtcgccacagttcgtacccagcggggactgaggaagatgaagggatggaggaggagcttagcccttttcgaggacgctcgcgctcggctccccccaatctctgggcagcgcagcgctatggccgtgagctccgaagaatgagcgatgaatttgagggttccttcaagggacttcctcgcccaaagagcgcaggcactgcaacacagatgcgacaaagcgccagttggacgcgcattatccagtcctggtgggatcgaaatttggggaaaggaggctccactccctcccagtgatctgctccacattcccggaattctacccgctcccatcgcccgccatattgggtgtgggcggaagtctttcgaggccttaggaaaaaaggatcgctgtgtccctttaacagggagaagagctgacgtacagcgttgagttccttccggtgcgtgcaatagccatggaggggtggcccttgctttggagttttcaaagttttccacacaccctaccccctacgcctccggaagtggctatgttccctctccgttactggacagccctcaggcgcctgtgctaagttgcgagtcctggtaaaccgagactgggtgctgtcctatcatcctagctggaggccccaggtcaagaaacgtgctttataataaagcccgcgcatgtgtaaaaaaaaaaaaaaaa

SEQ ID NO: 55 - DNA, 1590 bp, Rattus norvegicus
acgcgtccgacgttggtggtaccaggctgcccgctgggatgccgtgggctgtgggccggcggtgggcatggatcaccctgtttctgactattgtggcggtgctgatccaggcggtctggctgtggctgggtactcagagcttcgtcttccagagagaagagatagctcagcttgctcgacagtacgcagggctggaccatgagctggccttctctcggctgatcgtggagctgcggaggctgcacccaggccacgtgctgccggatgaggagctgcagtgggtgtttgtgaacgcgggcggctggatgggcgccatgtgtcttttgcacgcctcgctgtctgagtacgtgctgctcttcggcaccgccctgggctcccatggccattcgggacgatactgggctgagatttcagataccatcatctctggcactttccaccagtggagagagggcaccacaaaaagtgaggtctattacccaggagagacggttgtccatggacctggagaggcaacagatgtggagtggggaccaaacacgtggatggtggagtatggccggggtgttattccgtctaccctggcatttgcacttagtgacactattttcagcacccaggacttcctcaccctcttctatacccttcgcgcctatgcccggggcctccggcttgagctcaccacctacctctttggccaagacccctgaccagacaggctgaaggaagacctgcgagtggacaggagcgggcaggaccacatccatttctctactcgctgggactcatgttcactgacagcagcatataccatgcagataattaagttcctgctgtgtgaggaaggacatacatacacatacatccagacacagctcttggggagcaatgagacgcagagatgctaagacttgtatgtactgtaagatcatgcactcacctccatccagagagggtccccgacgtatactccaggggggcgcccagtcatgtttgaacacataccacgagcttgactcacctgactcaggcttttccagagcctcctgctggcattcggggctctgagatagaggattggggtagatgacacagtctgcctcgccctcgctctgatgccgcattccagtagtgatctctggtgaaggaaaagaggagctgcccttcggaggtcccgttcgcctgcagctgtgatgcccttccctccatccctttcctcaccatatgccttatctccattccagtcccctgctatgcaagtgtccctgtggcttgtcctccatgcccccagcgaccagctgggaaagcagaggaatgtagaggaagctgaaggactgaaggaaggaggttctccaccatggagaccctcagggttacaatgggaaagctggctgatgcctggggccagttcccaaagagaggacctggggaagtgagcctggctccgagaagccaccccattccaaaagaagcctttagtgtatgtgtgcacaccttgtcggtctccagacatttctgttgcattctctgtcttcctgtctctctctgttaataaaaacagatcaaacagtaaaaaaaaaaaaaaaaaaa

SEQ ID NO: 56 - DNA, 2099 bp, Rattus norvegicus
gcacccggttctcccgagtccttgccgaagtgtactgcgcgctcagagcagcccgacagtttccagccaaacttcagcaactcctcccttgccgcaccatgccgaagacgatcagtgttcgtgtaaccaccatggatgcagagctggagtttgccattcagcccaacaccactggcaagcagctgtttgaccaggtggtgaaaactattggtttgagagaagtttggttctttggtctgcagtaccaggacacaaaagctttctctacttggctgaaactcaataagaaggtgactgcacaggatgtccggaaggaaagtccgttgctcttcaagttccgggccaagttctatccagaggatgtgtctgaagaactgattcaggatatcacccagcgcctgttctttctgcaagtgaaggagggcattctcaatgatgacatttattgtccacctgaaaccgctgtgctcttggcgtcctatgccgtccagtctaagtatggtgacttcaacaaggaagtgcacaagtctggctacctggctggagataagttgcttccccaaagagtcttggagcagcacaaactcaacaaggaccagtgggaagagcggatccaggtatggcatgaggaacaccggggcatgctcagggaggatgctgtcctggaatatctcaagattgctcaggacctggagatgtatggtgtgaactatttcagcatcaagaacaagaaaggctcagagctgtggctgggtgtggatgccttgggtctcaacatctatgagcagaatgacagattgactcctaagattggcttcccttggagtgaaatcaggaacatctctttcaatgataagaaatttgtcatcaagcctattgacaaaaaggccccggactttgtgttctatgctcctcggcttcggattaacaaaaggatcttggccctgtgcatggggaatcatgagctgtacatgcgtcggcgaaagcctgacaccattgaggtgcagcagatgaaggcccaggctcgagaagagaagcaccagaagcagatggagcgtgctctactggaaaatgagaagaagaagcgtgagctggctgaaaaagagaaggagaagattgaacgggagaaggaagagctgatggagaagctgaagcagattgaggagcagaccaagaaggctcagcaagaactggaagaacagacccgcagggccctagaacttgagcaggaacggaagcgtgcccagagtgaggctgaaaagctggccaaggagcgtcaagaagctgaagaagccaaggaggccctgctgcaggcttctcgggaccagaagaagactcaggaacagctggcttcagaaatggcagagctgacagcacgggtctcccagttggaaatggctcgaaagaagaaggagagtgaggctgaggaatgccaccaaaaggcccagatggtccaggaagacttggagaagactcgcgctgagctgaagacagccatgagtacccctcatgtggcagagcctgctgagaatgaacatgatgagcaggatgagaatggagccgaggccagtgctgagctgcgggctgatgctatggccaaggaccgcagtgaggaagaacgtaccactgaggcagagaagaatgagcgtgtgcagaagcatcttaaggcccttacttcagagctggccaatgcccgagatgagtccaagaagactaccaatgacatgatccatgctgagaacatgcgactgggacgagacaaatacaagaccctgcgccagatccggcagggcaataccaaacagcgcattgatgaatttgagtccatgtagtgggcgcgcagccgttagggacccctcctccttcttccttgtcccccacactcctatagttttgcctaactaacaccctgctggagccactaactagaaaagccttggagccataccaaacattcagtatgaccatgggaccaaatttagtttccctattcatatccttgggcaaacaaatggcccacctgtgtagccaatggaacctcctcttccttctttgtcacactcattcaacatagctctctagaatagaccatttccccc

SEQ ID NO: 57 - DNA, 442 bp, Rattus norvegicus
gtgaccactaattcgtttcagcggtgataggataaagcagggacattaagaaataaattccccttcacgaccttcgcggagctcgctgcgcggttcctgcatattgatgcagccgcagggtgcgagcggctacttagcacagagactgctcctaggggcagctgcggccggggtgagccaggttgtgcgaagggaagctggcagcctccagtcctgaacttggctgggctagagcggagcgaggcgggagcaagagactgggagggggcggggagcgctcgctctggaagctcctaccctgtggcgctgttggagcccggagcatcctgccccggagcgaggctctggatccgcgcgctcagcagctgcgggaggaggaggcgcggaagacagggtgatcagcgggatccacagccctggaactgcgcgggctcggcagcag

SEQ ID NO: 58 - DNA, 1260 bp, Rattus norvegicus
gcggtagcacctcctccgccagcttcctcctcagaccgcttttcccgcgagccgaccggttctgtcatgtcgaccctcagtcccagcgtcgtgattagtgatgatgaaccaggttatgacctagatttattttgcatacctaatcattatgctgaagatttggaaaaggtgtttattcctcatggactgattatggacaggactgaaagacttgctcgagatgtcatgaaggagatgggaggccatcacattgtggccctctgtgtgctgaaggggggctataagttctttgctgacctgctggattacattaaagcgctgaatagaaatagtgataggtccattcctatgactgtagattttatcagactgaagagctactgtaatgaccagtcaacgggggacataaaagttattggtggagatgatctctcaactttaactggaaagaacgtcttgattgttgaagatataattgacactggtaaaacaatgcagactttgctttccttggtcaagcagtacagccccaaaatggttaaggttgcaagcttgctggtgaaaaggacctctcgaagtgttggatacaggccagactttgttggatttgaaattccagacaagtttgttgttggatatgcccttgactataatgagcacttcagggatttgaatcatgtttgtgtcatcagcgaaagtggaaaagccaagtacaaagcctaaaagacagcggcaagttgaatctacaagagtcctgttgatgtggccagtaaagaactagcagacgttctagtcctgtggccatctacttagtaaagcttttgcatgaaccttctatgaattttatggtttttatttttagaaatgtctgttgctgcgtcccttttgatttgcactatgagcctgtaggcagcctaccgtcaggtagattgtcacttcccttgtgagacagacagatctcttaaattaccactgttaaataataatactgagattgtatctgtaagaaggatttaaaaagaagctgtattagttttttaattggtattttaatttttatatattcaggagagaaagatgtgatattgttaatttagaatagtctaaagcgctcagtttcatatcagtaacagcatctaagaggtttccccagtggaataaacatgtttcagcagtgtgaatcgttgtcaaccgttccttttaaatgcaaataaatacattctaaaaatttaaaaaaaaaaaaaaaaaaaaaaaaaaaaa

SEQ ID NO: 59 - DNA, 602 bp, Rattus norvegicus
gagggcagacatttggaaaacaggcaagactttggagaaagcagaccaggtatgatggccaccttgccaccaacagcccacacttcccagcaacctgtaaacatagaggacgaagatgggatcctggatgagtatgaccagtacagcctggcccaatcttatgtcgtcggtggaggtcggaaaggacgtaccaagagagaagctgctgccaacaccaaccgccccagccctggtgggcatgagaggaagctgctgaccaagttccagaactctgaaaggaaaaaggcctggcgctgagacagagctggagatgaggccagaccacggacaccacacccagcaatggatacaggaccttggagaaattaggagttgtaagcaggacctaggcctgcttgattctttcccacctaagtgaggctctggagagggaacaccaaaaaaagcccttccggacccagctaaagggcaagttaggagcgagaagcagagggtagatgggcagagctaagaaggcacccccaaaaagaacagtgggaaaaactggatgcccttgggtggcagtaacaataaactgtacaacagtgacagcaaaaaaaaaa

SEQ ID NO: 60 - DNA, 3570 bp, Rattus norvegicus
cacactgcccaggtttaaggcagaaagaatatgttcattttgatggtagtatttttccttctccaccatccacttctcatggcaaatttcatcgatccctggtgcttttggagaacaaatttgaatgaagtcaaggaaaaaaacttggatataaattgtgccttcatccttggagcagttcagttgcctatggagaaagatatttcaatgagactttgaatgtcctaaaaacaactaaaaacaacaaatatgccttggcattagccttttcaatggaggaaatcaacaggaaccctgatcttttaccaaatatgtctttggttataaaacatactttgagctattgtgatggaaatactgcagaccatatatttaaagaaaaattttataagcctttacctaattatgtctgtaatgaagagactatgtgttcatttatgcttatagggctgaattgggtattgtctctaacactttttaaagacttggacatcttctcatttccacgtttccttcaaatttcctatggacctttccattccatcttcagtgataatgaacaatttccatatctctatcagatgaccccaaaggacacatcactagcattggcaattgtctccttcttactttacttcaattggaactgggttgggcttgtcatctctgataatgatgaaggcaatcaatttctctcagagttgaaaaaagagacccaaaacaaggaaatttgctttgcctttgttaacatgatgtcaatccatgagcattcatcttatcaaaaaactgaaatgtactacaatcaaatagtgatgtcatcaacaaatattattatcatttatgggaaaacaaacagtatcattgaattgagcttcagaatgtgggtatctccagttatacagaggatttgggtcacaaactcagagttggatttcccgacaagtatgagagacttcactcatggcacattctatgggactctgacatttctacaccaccatggtgagatttctggatttacaaattttttcgagacatgggaccatctcagaagcagagatttaaatctattaataccagagtggaagtactttagctatgatgcctcaggatctaactgtaaaatattgaggaactattcatccaatgcctcattggaatggataacagaacagaagtttcacatggcctttaatgattatagtcatagtatatataatgctgtgtatgccatggcccatgccctccatgagactaatctgcaagaggttgataataaggaaataagaaatgggaaaggagcaagtactcactgcttgaaggtaaactcatttctcagaaagacccactttactaattctcatggagagagagtgattatgaaacagagagtgagagtacaggaagactatgacattgttcacattcagaatttctcacaacaccttcggattaagatgaagataggaaagttcagcccatattttacacatggtggaccctttcacttatatgaagacatgattcagttggccacaggaagtagaaagatgccgtcctctgtgtgcagtgcagattgtagtcctggattcagaaaatcctggaaggagggaatggccccctgctgttttatttgcagcctgtgccctgaaaatgaaatttctaatgagacaaatatggatcaatgtgtgaattgtccagaataccaatatgccaacacagaaaagaacaaatgcattcagaaagacgtgatttttctaagctatgaagaccccttgggaatggctcttgccttaattgccttctgtttgtctgcattcacagctgtggtactttgggtctttgtgaagcaccatgacactcctattgtgaaggccaataacagaatcctcagctacatattaatcatgtcactaatgttctgttttctctgctcctttttcttcattggccatcctaacagaggtacctgtatcttacagcaaatcacatttggcattgtattcactgtggctgtttccacagttctggccaaaacaatcactgtcattcttgctttcaaactcagagacccagggagaagtttaagaaacttcctggtatctggtgcacccaactacattattcctatatgttccttattgcaatgtattctgtgtgcaatttggctagcagtttctcctccttttgttgatattgatgaacattctgagcatggccacatcatgattgtgtgcaacaagggctccattatggcattctactgtgtcctaggatacttggcctgcctggcgcttggaagcttcactacagctttcttggcaaagaatctgccagacacattcaacgaagccaagttcttgaccttcagcatgctagtgttctgcagtgtctgggtcacctttctccctgtgtaccatagcacaaggggcagggtcatggttgctgttgagatcttctctatcttggcatccagtgcagggatgtttggatgcatctttgcacccaaaatctacatcatattaatgaaaccagaaagaaattctatacaaaagttcagggagaaatcatatttctaaacaaatatttcaggaatttagttgaatattaagttggtatatacccaccaaatatttggttattgtgcatgtatagagttttagaatcagtcttactgattcctctattgctgtctagaggtatcttatctaccagtcttgcatacattgtccataaaatcttgtactcattcacttctttagtttcctctgagaaaactaaatttctcaaattattactaaaatgtaattcaacattatgctttcatggatatttccccctggttacatcagataaatttgataagacagctgattttgttaccttatatagaaggtatatgaatgtcctgccttacaggacagagaggaattacacttagaaaccgtctatcaagtcaaacattcaatcatactgaaaaataaactaaaggatcaacagagataaaaagcagaatacattttctgttttctagtcggagcatatacatgacagaattctgtttttatttacagttgctcttcaaggttttggtcaatagtctaagatgcaaatgttttctttttttctgatctcaaaaaaaatattatagccaacaattgaaagaagccagtgaccactgtgtttaaattaggaactagtttgaggatcctgagaaggagggtgactcattggaagaccagcagtcttatctaacctgaataacaaagaattttcagacactgagcctctaaccgggcagcatacaccagttgatatgaagcccccaacatatatgcaacataggatgtcctggtctggccttggtgagagaagacacacctaacccccaagagacatgatgctcaagggattgggaaggtgtgggagttgggaaggtggggactacttcttgatgctgggaaaggagatatggggtgaggaagtgtcagtgctcagactgggaaagggataatgagttcacagtaaaaaaaatgttaaagaataaaaatctaaaacaaaattaaaaaa

SEQ ID NO: 61 - DNA, 2890 bp, Rattus norvegicus
ttcaactagtcatgttcaagaaggggcaaatactttgttaatatgctcttcgcttggacttttatctcttgctttctgcagattccaattattttatgctcctacagaagcagcgagtgcttagtcaagatgaattatcgtttaaaggggaaaggaaatgtggtgattgttggatttttccctgcttttgctgtctaccccctcaacaaaacaattgactggtggatgcttaaattcagcaaagaattatgattgagtttaagttgaagagctaccagtatatttggccatgaggtttgccattgaggaaatcaacagcaatccccatcttttaccaaacacatccctgggatttgagatcaataatgtcccacacggtcagaggtacactctggtcaaactttttagctcactttcagggtctaattatgacattcctaactacataagtgcaagtgagagcaattctgctgctgtacttacaggaccatcgtggacaatatctgaatgcgtagggacactcctggatctttacaaatttccacagcttacttttgggccttttgatagtctcctgagtgaacaaagacggttttcttctctgtaccaagtggcccccaaagatacatttctgacgcctggcattgtatctttgatgcttcatttccactggaactgggtggggttattcatcatagatgatgacaaaggtgcccagacactgtcagacttgagaaatgagatggataaaaatggagtctgcacagcatttgtagaaatgatcccagtcatcaagggttcattttttaccaaatcctggaaaaatcatgtgcagatcctggaatcatcatcaaatgtgattattatttatggggactctgattctctattaagcttaatagtaaatattaagcagaagttgctcacatggaaagtgtgggtactgatctcacagtgggatgtttctaaatttgatgattatttcatggtagactcattgcatggagctcttattttttcacaccatcgtgaggagattcctaattttacagattttatgcagaagtacaacccttccaagtacccggaagacacttatcttcatgtattgtggcacatgtacttcaattgctcatttgttaagaaagattgtaaaattgtgcacaactgtttgcctaatgcctccctggggttcttgcctgggaacatatttgacatggccatgagtgaagagagttacaatgtatacaatgctgtgtatgctgtggcccacagtctgcatgagatgattctcaaccaagtacaatttcaaactcatgaaaaaggaaaaaagatggtattctttccttggcagcttcacccctttctaagggaaagacaactcatcaatcagaatggagcgaatgaagatctggattgtaccaggaagtcacatgtagagtatgacattctcaacttttggaatttcccaaaaggtcttgggctaaatgtgaaagtaggaacgttttctccaagtgctccaaaggaacagaaactgtccatatcttctaacatgatacagtgggccacagggtcgacagagattccacagtctgtatgcagtgagagctgtcatcctggattcaggaaaacccaccaggaaggcagggttgcctgttgctttgactgcattccttgtccagaaaatgagatctccaatgagacagatgtggatcagtgtgtgaagtgtccagaaactcactatgcaaacatagagaagatccactgcctacagaaaactgtgacatttctgtactatgatgacccattggggaagacactttgcttcatgtccctgggtttctcctcactcacagctgctgttcttgtggtgtttctgaagaacagggacacccccattgtcaaggccaataacctggctctcagttacaccctgctcatcactttgatgctctgttttctctgtcccttgctcttcattggccgtcccagcacagcctcctgtatcctgcagcaaaacatttttgggcttctgttcactgtggctctttccactgtgttggccaaaactatcactgtggttatagccttcaagatcacttctccaggaagaattagaagatggctgctgatatcaagggcccctaatttcattattcccttatgcaccctgctccaagtttttctatctggaatttggctgacaacctctcctccatttattgataaagatgctcactcagaacatggacacatcatcatcatttgcaataaaggctcagctgttgctttccattgcaaccttggatacctgggagcactagccctagtgagctactttatggctttcttgtccagaaacctacctgacacattcaatgaagccaagttcctggctttcagcatgctggtgttctgcagtgtctgggtcaccttcctccctgtctaccacagcaccaaggggaagaacatggtggctatggaagtcttctctatcttggcttccagtacatctctcctaggcatcatctttgcccccaagtgctacctcatattattaagaccagaaaggaattcacttagctatatcagggacaaaacatatgctaaaagcataaaaccttcttagcatccttatgtgcctcttaaattaaacagcatcattgaaggcaattgttgttcttcactatctgaacactcacatataaagtcataattgtacatttgatccaggggctattatttctttagtagtcatatatatgtacctaatgcttttttcacattaaaatatgtgctgcatttttcgtcttcctcttctacttactattagttttgtgctattgatttaacttgcaataaaatccaaatttctgagttcttccaaaaa

SEQ ID NO: 62 - DNA, 2047 bp, Rattus norvegicus
gcacgagggatcatggtagggctcagtaaatctccctccatggcttgttggagaggcatagactgttgatcggagtctactctggacccaggctgctccagttgtgagatgtggtgatctaccagtgtccattgcggtctccctttgtgagtcgcgtcatctctccatgccccggggggctggtgccccttgacaccactactgggcacaatgtcgacatcatcgctgcggcgtcagatgaagaatatcgtccacaactactcagaggcagagatcaaggtccgggaggccacaagcaatgatccctggggcccatccagctccctcatgtcagagattgctgacctcacctacaatgttgtggccttctccgagattatgagcatgatctggaagcggctcaacgaccatggcaagaattggaggcacgtctacaaggccatgacgttgatggagtacctcatcaagactggctctgagcgtgtatcacaacagtgcaaagagaacatgtatgctgtgcagacgctgaaggacttccaatatgtggaccgtgatggcaaggaccagggtgtgaatgtgcgggagaaggccaagcagctggtggctttgctgcgtgatgaggatcggcttcgggaggagcgcgcccacgcgctcaagaccaaggagaaactggcacagactgccacggcttcctcagcagctgtgggctctggaccacctcccgaggcggagcaggcatggccacagagcagcggggaggaggagttgcagctccagctggccctggctatgagcaaggaggaggctgaccagcccccgtcctgcggccccgaggatgacgtccagctccagctggcccttagtttgagccgagaggagcacgataaggaagagcggatccgtcgtggggatgacctgaggctgcagatggcaatagaggagagcaagagggagactgggggcaaggaggagtcatctcttatggatcttgctgacgtcttcacaaccccagcccctccacaggcctcagacccttgggggggcccggcatctgtgcctactgctgtccctgtggctgctgctgcctcagacccttggggggcacctgctgtccctccagctgctgatccttggggtggtgcagcccccacgccagcctccggggatccttggaggcctgcagcccctacagggccctctgttgacccttggggtgggaccccagctcctgcagctggagaggggcccacatctgacccgtggggaagcgctgatggtggggcccctgtcagtggacccccatcttctgacccctgggcacctgccccagctttctcagacccttggggaggttcacctgcaaagcccagcagcaatggcactgcagttgggggctttgacactgagcccgatgagttctcagacttcgaccgactccgcactgccctgccaacctctgggagcagcacaggggaattggagttgctcgcaggggaggttcctgctcgcagccccggggcattcgacatgagtggggttgggggatctctggctgagtctgtggggagtccccctcctgcggcaaccccaactcctaccccgccaacacggaagactccggagtcattcctaggccctaatgcagcccttgtggacttggactcactggtgagccgaccaggccctacaccgccaggagccaaggcttccaacccattccttccaagtggagctccggccaccggcccctccgtcaccaatcctttccagccagcaccccctgcaacgctcaccctgaaccagctccgtctcagtcctgtgcccccagttcctggagcgccacccacctacatctctcctcttggtggaggccctggcctgccccccatgatgcccccgggtcccccagcccccaacactaaccccttcctcctataatccagggtaggagggaggcctggttcagctggcttccccaatttctgctccctgggagatcagtgttgtgagtgcatgtgaaatggggggggggcctccccctcgtgcc

SEQ ID NO: 63 - DNA, 1131 bp, Rattus norvegicus
atgattcaaaaaccgcaaatgtatgtttatatttacctgtttgtgctgattgctgctggcccagtggatctaaatgaggacagtgagagagaggcgaatgtggaaaaagaggggctgtgtaatgcgtgtgcgtggagacaaaacacaaggtactccagaatagaagccataaaaattcaaatcctcagtaaactccgcctggaaacagcgcctaacatcagcaaagatgctataagacaacttctgcccagagcgcctccactccgggaactgatcgatcagtacgacgtccagagggatgacagcagtgacggctctttggaagatgacgattatcacgctaccacggaaacaatcattaccatgcctaccgagtctgactttctaatgcaagcggatggaaagcccaaatgttgcttttttaaatttagctctaaaatacagtacaacaaagtggtaaaggcccagctgtggatatatctgagagccgtcaagactcctacaacagtgtttgtgcaaatcctgagactcatcaaacccatgaaagacggtacaaggtataccggaatccgatctctgaaacttgacatgagcccaggcactggtatttggcagagtattgatgtgaagacagtgttgcaaaattggctcaaacagcctgaatccaacttaggcattgaaatcaaagctttggatgagaatgggcatgatcttgctgtaaccttcccaggaccaggagaagatgggctgaatccctttttagaagtcaaagtaacagacacacccaagaggtcccggagagactttgggcttgactgtgatgaacactccacggaatcgcggtgctgtcgctaccccctcacggtcgatttcgaagcctttggatgggactggattattgcacccaaaagatataaggctaattactgctctggagagtgtgaatttgtgttcttacaaaaatatccgcatactcatcttgtgcaccaagcaaaccccagaggctcggcaggcccttgctgcacgccaacaaaaatgtctcccattaatatgctatattttaatggcaaagaacaaataatatatgggaaaattccagccatggtagtagaccggtgtgggtgctcgtga

SEQ ID NO: 64 - DNA, 3938 bp, Rattus norvegicus
gttccacttcctgaggcagctctgacaaccgctcgagtcctcacactgcagcctctgcctttgcttggtcacatccacatccaccgtaaagttgaggaacatctctctaaggcctggctcgcacacagctgcatctgctccagctatgaagtggctcttccatacccttctctgcatggccagcctgaagccccagggagccttcaatatggatgtggactgggcctgggtcacagcactccagccaggtgcaccggctgtgctcagctcccttctgcatctagaccccagcaacaaccagacctgcctcctggtagccagacgcagctccaacaggaatacagccgccctgtatcgatgcgctatatccatcagtccagatgaaattgcttgccagccagtggagcacatctgtatgccaaagggcaggtaccagggagtgacattggtcgggaaccacaatggtgttttggtgtgcattcaggtacaggcccggaagttccgcagcctcaactcagagctcacgggtgcctgcagcctactcacccccaatttggacctccaggcccaagcctacttctctgacctcgaagggttcctggatccaggagcacatgtggactctggtgactactgtagaagcaaaggaggcagcacaggggaggagaagaagtcagccaggagacgccggacagtggaggaggaagacgaggaggaagatggcactgagatcgctattgtcctggatggctcaggaagcattgaaccctcagacttccagaaggccaaaaatttcatctctaccatgatgaggaacttctatgagaagtgttttgagtgcaactttgccctggtgcagtatggggccgtgatccagactgagtttgatcttcaagagagccgggacattaacgcctcccttgccaaagttcagagcatcgttcaagtgaaggaagtcactaagaccgcctcagccatgcagcatgtcctagacaatatcttcattccaagccgtggctccagaaagaaagcattgaaggtcatggtggtacttactgatggtgacatatttggtgaccctctcaatcttacgactgtcatcaactccccaaagatgcagggtgttgtgcgctttgccattggggtgggtgatgcattcaagaataacaacacttacagagaactgaagctgattgcctcagaccccaaagaggcccacactttcaaggtgaccaactactcagctctggatgggctgctgagcaagctgcaacaacgcatcgttcatatggaaggtacagttggagatgcccttcaatatcaactcgcacagactggtttcagtgcccagatcctggacaaggggcaggtgttgcttggcactgtgggggcctttaactggtctgggggtgcgctgctctacagcacacagaatggccggggctgcttcctaaaccagacagccaaggaggactccaggactgtacagtacagctacctaggttactcccttgcggtgctacacaaggcccatggcatctcttacgtggcaggggctccaaggcacaagctccgtggggctgtgtttgagctccggaaggaggacagagaggaggatgcctttgtgcgacggatagaaggagagcagatggggtcctactttggctctgtgctgtgccctgtggatatcgacatggatgggaccacagattttctactggtggctgctccattttaccacatccgtggagaagaaggcagagtctatgtgtaccaggtgcctgagcaggatgcttccttctccttggcacacacactgagtgggcaccctgggctcaccaatagccgctttggctttgccatggcagctgtgggggatatcaaccaagacaaattcacagatgtggccattggggcccctctggagggttttggggcaggtgacggggccagctatggcagcgtgtacatctacaacggacactcaggtggcttgtatgacagtccttcccagcagatccgagcctcctctgtggcctcgggactccactacttcggcatgtctgtgtccggtgggttagatttcaatggcgatggccttgccgatatcacagttggctctcgggactcggcggttgtgctccgctcacgccctgtggttgacctgaccgtatctatgacctttacccccgatgcactgcccatggtcttcataggcaagatggatgtaaatctgtgttttgaagttgactcttcagtcgtagcttctgagccaggccttagagagatgttcctcaactttacggtggatgtggatgtgaccaagcaaaggcagaggctgcagtgtgaggactcgagcggttgtcagagctgcctcaggaagtggaacggagggtcctttctgtgtgaacacttctggctcatctccacagaggagctttgtgaggaggactgcttctccaacatcaccatcaaggtcacctacgagttccagacgtctgggggaaggagggactaccccaaccccaccctggaccactacaaggaaccctctgccatcttccagctgccctacgagaaggactgcaagaacaaagtgttctgcatcgctgagatccagctgaccaccaacatctcccagcaggaactggtggtgggcgtcacaaaggaggtgaccatgaacatcagcctgactaactctggagaggattcctacatgacaaacatggctctcaattatcccagaaacttacagtttaagaagatacaaaagccagtatctccagatgttcagtgtgatgaccccaagccagttgcttctgtcctggtcatgaactgcaagattggtcaccccatactcaagagatcatctgtgaatgtctcagtaacttggcagctagaggagagtgtctttccaaataggacagcagatatcactgtgaccatctccaattccaatgagaagtctttggccagagagacacgcagccttcaattcagacatgccttcattgcagttctttccagaccctcagtgatgtacatgaacacaagccaaagcccttctgaccacaaagaattcttcttcaatgtgcatggggagaatctttttggagctgtattccagttgcaaatttgtgtccccatcaaattacaagatttccagattgtaagagtgaagaatctgacaaaaactcaggaccacactgagtgcacccagagtcaagagcctgcgtgtggaagcgatcctgtgcagcatgtaaaagaatggcattcagtggtctgtgctatcacatctaataaagaaaatgtaaccgtggccgcagagatctccgtgggccacactaagcagttactaagagatgtatctgaactgccgatccttggtgaaatatctttcaacaaatctctctatgaggggctgaatgcagagaaccacaggacgaagatcactgtcatcttcctgaaagaggaggagacacgctctttgcctctcatcattggcagcagcatcggaggcctcctggtcttggttgtgattatagccattttgttcaagtgtggctttttcaaaagaaaatatcaacaactgaacttggagagcacaaggagggcccagctgaaggctgacagtctgctccaagattagccccctgcttcctcaccggaaggagggagtttgagccagtcggaagccgggatgccccctatcggggccccttactctccttaggacgatcaagcaacatcaaagaactgtagagtgttgttcatagccacacactatgcccacagtgtcttgtgaattgagcaaaagggaaacttaggatgtgtgctattaaatacatttacttttacagcagtgcctttaatgagcacggttcccagtttgccatgcgttttgatgactgatagaccaaagtcttattcctattaaa

SEQ ID NO: 65 - DNA, 3845 bp, Rattus norvegicus
gtctgcagaggatggagcttacttattcagagttaaagatgtctccagcctgggaggctgagagtggaaattcaccggctcagcggttagtcaggagtgaatccctgcaggaaagccccgcctgcctaggctcagcaggtcactcattcgctgactcagtcgcttagcaaacacagtgttcaccacccacacgctaggccatgcatctagactgacatggcccctgccctactgaggggcagacactgcctccagggaggctcacttgctatgggcttgctttcttcccaagggctactgttcaaggaactcttgtgttgaccacaggctgaggcttccaacaacttctccaaattcacacagtagagaacaggccatgatgctctttcctgcagccagacccctgacatggggtgagagaacaggtgagcaggccagagtcagtgtccgggcccagcagctgccttttgggaagtcagttctgagtagacgggcctggttaaaatcctggcgatgccattttctggttgtgaccttgcacaggtcatcccctctctgagcacctgtttccctcctctataagtaagtggtgacaagactcagtttttcttccctaaggtgtccgaaaaggggagggccacagctcctcgtgccgaattcggcacgaggcgggctgcgggctgcgtccccattcattgcagtggtctgctgggttggggtccagtgtttccggagtcatggaggcgctgatcccggtcatcaataagctgcaggacgtcttcaacaccgtgggcgccgacatcatccagctgcctcagattgtcgtagtgggaactcagagcagtggaaagagctcagtgctggaaagcctagtggggagggaccttcttcccagagggactggtgtggtcacccggagacctcttattctgcagctggtccacgtttcaccagaagataaaagaaaaacaacaggagaagaaaatgaccctgctacatggaaaaactcaagacacctttctaaaggagttgaagcagaagaatggggtaaatttcttcacaccaaaaacaagctttacacagattttgatgaaattcgacaagaaattgaaaatgaaactgaaagaatttcaggaaataataagggagtaagccctgagccaatccatctcaaggttttctcgcccaacgttgtcaacctgacgcttgtggatttaccaggaatgaccaaagtacctgtaggtgatcagcccaaggatattgagcttcaaatcagagaacttattcttcggttcatcagtaatcccaattccattatccttgctgtcactgctgcaaatacagatatggcaacgtcagaggcacttaagatttccagagaggtagatccagatgggcgcagaactctagctgtaatcaccaagcttgatctcatggatgcgggtactgatgccatggatgtattgatgggaagggttattccagtcaagcttggaataattggagtagttaacaggagccaactggacattaacaataagaagagtgtaactgattcaatccgtgatgagtatgcttttcttcaaaagaagtacccatctctggccaacagaaatggaacaaagtatcttgctaggactctgaataggttacttatgcatcatatcagagactgtttaccagagctgaaaacaagaataaatgtcttagctgctcagtatcagtctcttctaaatagctatggtgagcccgtggatgataaaagtgctactttactccagctcattaccaagtttgccacagagtattgtaacactattgaaggaacggcaaagtacatcgaaacttctgagctatgtggtggtgctaggatttgttatattttccatgagacttttgggcgaaccttagaatctgttgatccactaggtggccttaacactattgacatcttgactgccattagaaatgctactggcccccgtccagctttatttgtgcctgaagtttcatttgagttactggtcaaacgtcagattaagcgtctagaggagcccagcctccgctgtgtggagctggtccacgaggaaatgcagaggatcattcagcactgtagcaactacagcacacaggaactgttacggttccctaaactccatgatgccatagttgaagtagtgacttgtcttcttcgtaaaaggttgcccgtgacaaatgaaatggtacataacttagtggcaattgagctagcatatatcaacacaaaacaccccgactttgctgatgcctgtgggctaatgaacaataacatagaggaacaaagaagaaacagactagcaagagaactaccttcagctgtatcgcgagacaagtcttctaaagttccaagtgctttggcacctgcctcccaggagccctcccctgccgcttctgccgaggctgatggcaagttaattcaggacaacagaagagaaactaaaaatgttgcatctgcaggtggtggaattggagatggtggtcgaattggagatggtggtcaggaaccgacaacaggcaactggagaggaatgctgaaaacttcaaaagctgaagaattacttgctgaagaaaaatcaaaaccaattccaattatgccagcaagtccacaaaaaggccatgctgtcaatttgctagatgtgccagttccagttgcacgaaaactgtctgcccgagaacagcgagattgtgaggttattgaaagactcatcaaatcatattttctaattgtcagaaagaatattcaagacagcgtcccaaaggcagtaatgcattttttggttaatcatgtgaaagatactcttcagagtgaattagtagggcagctgtataagtcatccttattagatgaccttctgactgaatccgaggacatggcacagcgaagaaaagaagcggctgacatgctgaaggcattacaaggagccagtcaaattattgctgaaatccgagagactcatctttggtgaacagaactgtttggtcttctacactttgctgacttgaacctactagctactgcctacctgagtagaagtttatttatggacttttgtgtatcgcagtgtatgaatttgcttgtgtgaagactggctataagctgaaaagtatattattcattacaagacaaatcacatgtttaattcacatttttcaagtttcctatgatgtatatcaagtctgtccgtttcagtcaaacttacaagaacaattgatgttctagttgtacaaagcagtttgcctgtgcatatgatgacccgcgtaacctttttttagtcttaaagctgcagccgtagtcctcaaagaggaagctccaggacatttcatgactataatgcatgcactatttatatagactgacctggcttcaaaaggtggagcctggcgagttcctcacataatcaatgtatccacctatccttcatttttatagtcttaaaaaacaaacaaaattctgtaacttctgcagttttaggaaaaatataagatctgaaagactcataaagatgtaggaacagactgtgtaattaatggctcctgagtctatactgccctaatgttagaaagtaaaatatgctttgattcaaaataagcctgaaaatataaattgacttcctgcattaaaaataactattaggaactttcttagtaacaataactggtcctgttagtttctaaatgactcagtgacaacctaaatttccctaatttacaagtacatcgattgcagtccagatgcaccttagggtggggcgctgactctggggctccgagactcagttatgtgagacctaaaagtctactctgtt

SEQ ID NO: 66 - DNA, 2837 bp, Rattus norvegicus
gaattcggcacgaggtggaaagcactgagacgtgaagatgagtgaacttgaccagctgcggcaggaggccgagcaactgaagaaccaaattagagatgcccgtaaagcatgtgcagatgcgactctttctcagatcacaaacaacattgatccagtgggaagaatccaaatgcgaaccaggagaacactgagggggcatctggcaaagatttatgccatgcactggggcacagactcaaggctccttgtcagcgcctctcaggatgggaaactcatcatctgggacagctataccacaaacaaggttcatgccatccctctgcgctcctcttgggtcatgacctgtgcatacgctccttctgggaattatgtggcctgtggtggcctggataacatctgctccatttacaatctgaaaactcgtgaaggaaatgtgcgtgtgagtcgtgagctggcaggacatacaggttatctatcctgttgccggttcctggatgacaatcagatagttaccagttctggagacaccacatgtgccctgtgggacatcgagaccggccagcagacaaccacgtttactggacacactggagatgtcatgagcctgtctcttgctcctgacaccagactgtttgtctctggtgcttgcgatgcttcggtcaagctctgggatgtccgagaagggatgtgccggcagacctttacaggacacgagtctgacatcaatgccatatgtttctttcccaatggcaatgcctttgccactggctcagacgatgctacatgcaggctgtttgaccttcgtgcagaccaggagctcatgacctactcccatgacaacattatctgtggtatcacatctgttcccttctccaagagtggccgcctcctcctcggtggctatgacgacttcaactgtaatgtctgggatgcactcaatgctgacagagcaggtgtcctagctggacatgacaaccgagtcagctgcttgggggtgactgatgatggcatggctgtggcaacaggatcctgggacagcttcctcaagatctggaactaaggccacagcaggtggatggatgccatggcgactggaagaccattccaaccttgaagcgttactgcgatagcatatcctatccaaccatactaacgtggacacccacacctcccctcagaacttcaaaagggcaagatcttttttccttcacttattgctgaaaccaagagcacaactcccattaagagaaggatctctgtgctgtaaactaaaacaaattgtgcatttttctggggccattgtctttggtttattttgttttgttttttgtttttgttttgtttgtcttgggcaaatttttaaaggaaatactacaataaaaatgttaaccagaaggtaaccctgagtatgattgtgagagagacacaccttcttactagttcatttgcatttaaatcagtgatcctgatctgtggcaatcatgaaaaacaagttgaagactttgtttatctggaattgtttctaaatataagtcatttgtagcaagactttggaagcattcacgtttcttccttaaacatattcctttatgttcagtagttaagagaaccagagcccatgggggtgtctgactgtcactgatgcatttttgtccctggcttgcttttttttttttttttttttttttgtctcatgtcacagatgactgtttcgcacaaacacagcatagtggaagaaaaaattcagaagcaaagtagccaagcacatgttatgatggccacgaatgcttggtcagaatccttccctttgctcagcagtgaacttattcccagcacccttccctcctcactgtccagtttctgttctttccttgggtttcctgtgaagttggagggaagtttgtagtcatgtgacactagccgtcctgcccctgctgtcagattttttttctccagagaggtgcctgtcctgtgcttggatagtcagtttgtgtatgaaacaatgtacaaatcaatgttttgaaaataatgatctcagactttctaagttaaattttaaacaatttgattgtttgccatattgggtgggtttactcttagaatcgcatgctgtagaaatgctctaaagtgcatataggactcagtccttagatgttctttttattttaagaaataacctcttcaagttgtaaccgtggcggctttgtccattactgttgctattctgcacacatatcggaagcagcaagcgctttacacactcgagtagtgggataagtcactgttttctttactttacaagatgatagtcctgttgggaatgactgctgctggcttcaggaagggagggaagctgctccgctgcctctttgccacttcctggaagcagcctccatggaacagcctttgcatctgaggcaaccatttttacaccgtgcagatcttcgtggttatcatctcaaagccatgttcagcagcagcgtttggacagcagtgttctgtgggccctcccatcccccgatatcctgcacccctcatagcagtagtggcttcgccattctgttttctgcagcgtcctgtacaaaactgtgctgtgactgtgcggtaggcctggacatggcaaagagaatacagcgaagccccttctcttcctaccaaacgactctgtagagctctctgcaccctgtaccctttccaccttttgtatttaattttaaagtcagtgtactgcaaggaggctggatgcaagatagatactatattaaactgtactgttatttaagatgtaataaagcagtttgacatgaggaaaaaaaaaaaaaaaaaaaaaaaaaaaa

SEQ ID NO: 67 - DNA, 2649 bp, Rattus norvegicus
gggtgggctgcggtgggcggcggtcttgcaccccggagctcgcacgtacccagtttcctccttccggagtggctgcactcaggcacccagcgggccggcgggcgggtagcggcgcggaggtctgggcggggcgggcctcccgggctccggggacgcccacaggccctgcgaggccagagcagagcgccggcggcggggaagagcgcgagcgccggggcacggagggaaggatcatcggatggaccctgtttgacaacatgcaccaccagtggctcctgctggctgcatgcttttgggtgattttcatgttcatggtggccagcaagttcatcacgttgaccttcaaagacccggatgggtatagtgccaaacaggagtttgtgttcctgacggccatgccagaagcagagaagctaagaggagagaagcatttttctgaagtcatgaagccaactgggaagatgctttcggagagccatcctgatcagcccccggtttatctggagcggctggagctcatcagaaacgcttgcaaggaggaggctctgcggaacctctcccacaccgaggtctctaagtttgtcctggatcgaatctttgtctgtgacaagcacaagattcttttctgtcagacccccaaagtgggcaacacccagtggaagaaagtgctgatcgtcttaaatggagcattttcttctattgaagagatcccagaaaacgtggttcatgaccatgagaaaaatggccttccacgtctctcttccttcagcaaaataggaattcagaagcgattgaaaacatacttcaagttttttattgtgagggatccctttgaaagactgatctctgcctttaaggataagtttgttcacaatcctcgatttgaaccttggtacaggcacgagatagccccgggcattattaggaaataccggaagaaccggacagagacccggggtatccagtttgaagattttgtgcgctacctgggtgatccaaaccgcaggtggttagaccttcagtttggggaccatatcatccactgggtgacctacgtaaaactctgtgcaccctgtgagataaagtacagtgtgattggacaccacgagaccctggaggcagatgccccgtacatcctaaaagaagctggcattgaccacctggtgtcgtaccccactatccctcccggcatcaccatgtacaacaggaccaaggtggagcagtacttcctgggcatcagcaaacgagacatccggcgtctctatgcacgttttgaaggggacttcaagctctttgggtatcagaaaccagattttttgctaaattaaggcatcagactcctgaatattgctagttccggggatggctaggtggagatgtgagaacatgggacctctaccctgtcccatggttccgtgcatggatgatgttgggcgctgattacctgcttcactcgggtgacaaatgctctgatgactcccctccccagcctgtgtcacccccacgaaaggttaggaaagactggacgtgtgcagacaggtagacagacccagaggagcctgcttccttcaactgtcacattgtccttggtgctgtgtcagcttgcctgtagtcgggtggtgtcacccatgacctgtggactgcacagacccagcgctttcaagagagatggggatactgaacggctgcaaaggttactggggcccatgcagagtcgaatctaagccagaatgatacctcttccttccattttgacactagccacagatcagtcacttcttgagcttgaggccctgtgacactgggtggtggtaatcacagaacaatctggaagctctgatctttcgggacccaggctagctcttttttccggacctctgaccccacaagtacctgcttaattctgcagaagagatcccttctggaaagtgagggcattatcagaacatctctgacgacctagaacttggcatgggcaaggaggaaccagccggtcctgggaactctgggtgcaccgttgtctctgacacctgcttttgtcttcgacggccccaagggagcgagcagcaggggcgtttccacctctctcctgaacgcacctcccctgtcctgagaggggagagaagacaaagcatttccggtggacagagacgagcgcatgccgacgtgccgtgatgacgcacaggcgtgcagtgcctgcattgcggagtccagtgctgtctgcagactgtcaagtccgttcatgtcggcagacgggatcctacggtcctgaatctaatagtgccactgtcctcgactgaaagacccgcaagttggataatcagattcgtcagcaataaaatcctgggtgaggccgcctccggtgatgtcgccccaggtgacaagtcacctaacgtggcactgaggccagccccagcaagaaagccacagcagctgtcacagctgccaaccagcagcaaagggttattaaagatggagggacagtttttctgagtaagtcccctggcacatgcatctgcctggggttgagaggaattgtgccagtttttcctagaggtgacagccctactctcaaaaagcctttcctgaacttgtaaatgtgaaagtaaaataaaatttaaaatgtgtgccaaaaaaaaaaaaaaaaaa

SEQ ID NO: 68 - DNA, 3680 bp, Rattus norvegicus
agggactacgaacctgggctagaaaagtctaggctgagacagaggctaactgctgtcgccgcagacgtacgaaaccctctgccgggactgggtgcctgcaccatcgcagtgctagcgttttctcgtagcttgcacggtgttctcctgaacagcatgcttggggttttccttctgggtgtgctggctccagctggcctggggatctctgcactagccaagctgcagcccaaaggcagtcaatgcgtggggaatgagtgcttcgcgcttttccaggaccccgtgaccttcctcgatgccagccaggcctgccagcgcctgcagggacatttgatgacagtgcgctcctcggtggctgcggatgtcatctcccttctggtgagcgacagtagtatggactcacggccctggatcggtttacagctccctcagggctgtggtgacccggtgcatctcgggcccctgcgcggcttccagtgggttactggggataaccacaccagttacagcaggtgggcgcggcccaacgaccagtcgcctccactttgcggtccgctgtgcgtcacggtctcaacagcaacagaagctgcaccaggcgagccggcctgggaagagaagccgtgcgagaacgagaccaagggttttctctgcgagttttacttcgcagctttctgcaggcctttacgggtgaatacccgagatcctgagggtgcccacatctctagcacctacaataccccattgggggtcagcggcgcggattttcagacgctgccgataggcagttctgctaccgtggcgccctttggcttggagctggtgtgcagggccctgcccggaacttcagagggacactggactcgggaagtgacaggagcttggaactgcagcgtggagaatggtggctgcgagtacatgtgcaacaggagcgctaacggacccagatgcgtctgccccagcggcggggacctgcaggctgatggccgttcgtgcgcaaaacctgtggctcaattgtgcaacgaactctgccagcatttttgcgtcaacaactctgatgtgccaggctcttattcctgtatgtgcgaaacaggctaccagttggcggcagacggacatcggtgtgaggacgtggatgactgtaagcaggggcccaatccatgccctcagctctgttctaacaccgagggcggcttcgaatgccgctgctatgatggctatgagttggtggacggagagtgcgtggagcaactggatccgtgcttcagatctaaatgcgagtatcagtgccagccagtaaactccacgcactacaattgcatctgtgctgagggcttcgcacctaagctggatgatcccgacaggtgcgaaatgttctgcaatgaaacttcgtgcccagcagactgtgaccccaactccccaagcttttgtcaatgccctgagggcttcatcctggacgagggttccatatgcacagacattgatgagtgcagtcaaggcgaatgcctcaccaatgaatgtcgaaaccttcctggctcctatgagtgcatctgcggacctgacacagcccttgctggtcagattagcaaggactgtgaccccatccctgttctggaggactcagaggatggtggctctggggagcacccatcaagcaatccgacggtagtctcttcgacagttcccccttctgcaagaccaatgcactctggtgtgctcattgggatctccattgccagcctgtccctggtggtggcgcttttggcgcttctttgtcacctgcgcaagaagcagggcactgctcgcgcagagctggagtacaagtgtacctcttcagccaaggaggtagtactgcagcacgtgaggactgatcggacgctgcagaagttctgagggatttactccagagaccaaggtggcctttgtctttccgggctctgtacctctcctttctctctcttcagcctcccagctgtgctctctggcaatgtaaaagcattctggctggtataataaccagagaagagctcatcctcttatgacaagcgagggtagggaggacttgaagccggagagcccagtttcttccaagtagagactggacaactgggcggaggtgacaaatacagtgaagatcccagagtgtcccagtccctcacctcggggtgcaggatgtgtgggtgctgctgatctgtaggcttggaggcaaaccttgaccctatggactggagatgacccagatatttatttttttaaaagtatttagtattttcttcccttcagctttattctgcttgtaagtctccagtccctcacccttttctgtgtccctccattcctttccctcccctccccctctccatcattctcctccccgaacctgatcatagtttgcctttacccttgtctccaaactcttatgtgaaacagaaaaaaaaaaaacactaaacgcagaaaaatattttttttcgctagctttggcaatttaatcggggatttcaggtaaccagagcaaaagaatttaaacaaaagttaaaatgtttcaactgaacactaactagttaatagtgctggaatatcacagaatttaaactcaaggaagtagggttttgattttttttaatctttgtttttgaaagggtgagcctgggttttatgattgttgctgttgttttttttttatttagaatgacaaaagaggtaataattattaaactttttatgccggcttctacagtgttattaatttttgacagtgtttcaaatgtgcagaggatcctttgtccaaccctttgacattccaataggacattgccatcttcagacatattgggccacattcatagctatccaagaatgtatgtggtccttagcctggacatatctgagacggatggatggaagcatcttccagtaaagcttgagctgtatgcttcgtgcctggctgactctccactgtgtttgccatttgtagtcccaaaataaaagcaatgtgctgcttagggagatatggcaacttgggaaaggagtctggggggtgactagatgggactttgctttaatgaaactctggaacgatatcttgtacttcagagagatctactagccctggcctatacacaagaattgggacctcccttgggatctggctagaattgcaaaatcctaacccccaccctaccccactcccaccccagtgagccagttcataagaagctgcattttgacaacatccacagggcattgtccagtcatttcaggacaactggtctaaagagtttccaacttcttgagaacatttaaatgtcacttaataataagtagcaggccatatgcaggccattttttaataaagaaactgaggaattttctctgcatagctttgctttctggataaaataaaaggaccaggtacatgcctctagatattggcatacagagtccagaagggttttgttttaagtaagctaggaatgagttcatatgtcagtgtaaggaacaaatgtatcatatgtgtatcttttgtgaagaaaaggttttctttactgttttgtaggctcagcatatctgtacatatttatttattggagtttagctagaacacaagcaaagcctttgcttatgacgtcacgtgtataaaataaatagattacaatgtaaaaaaaaaaaaaaaaaaaaaaaaaaaa

SEQ ID NO: 69 - DNA, 2068 bp, Rattus norvegicus
cttggcaaccaccacacaagagaggccctccttttgctggggctccctgtaaccctcgctcgactgggcccattgcttcctgatgtgactcctgccctgggctgtgctccccatcatggctgacaccatcttcagcagtggaaatgatcagtgggtgtgccccaacgatcggcagcttgctctgagagccaagctgcagacaggctggtctgtgcacacataccagacggagaagcagaggaggactcaatgcctgagccctggagaggtggaggtcatccttcaggtcatccagagagcagagcggctggacatcctggagcagcagaggattgggcggctggtggagcggctggagacgatgcagaagaacgtgatgggcaatggtgtctcccagtgtctgctctgcggggagatgttgggattcctgggcagctcctctgtattctgcaaagactgccggaagaaagtctgcaccaagtgtgggatcgaggcttcccccggccagaagcggcccctgtggctgtgtaagatctgcagtgagcagagagaggtctggaagaggtcaggggcctggttctacaaagggctccccaagtacatcttgcccctgaaaacccctggccgggctgatgatccccacttccgacctctgcctgtggagcccacagaaccacagcctcagagtgctgaagtcagccgtgtctacacatgggcccgagggagagtggtttctagtgacagtgacagtgactcagatctcagctcctccagcctggaggacagacctatgccctctgggatcaagggcacaaaatatgacaagcctagaggggactcaggtggcagcatggagtcacccaggatggggcctgcccgaccgcccagccatctttctggcagccagagcagcctgggcagtgagacgggggcaggtgctacagatccacagggaggcaccctaccccggcctgagcccagggtatccggcaaaaggcatacctgggcaactacccattactgaggtggccggctgacctccctgggctgaggcacactctctggaggaagattcagagagagacaacagggccggcctaccggagcccctctctgaaggttcttgagggctcacaagctccctgataccttgacctgcaactcaacaagccagtgtttggggaccgagcgtgcttgcccccaccctgtagtgccttctctactatctcactcagcaccccaccttttatttattgcccctcccccatcccagtcacatctcgatttgctcgggccttgggttgggttggaaaggccttcctctatgcactgaagtttgggtgggacacacagggctttctttgtactaatgatgcgcactctaaccctcagtgtgaccctgcggagctgagcaaccccaccccacacccccacacccccctccccccaccacattcccagtgtaaacctggagcaccaggctgtccctattcctccaaccggcggcggaggccagagcaaggtcctatttgccccgaggctggtccaggagctgagttaaatccagctttgaggtttccccgaagcccctattggcctctgggtttttgttctaccctgaaacacagctccccctcagacattaaaatgctttttgttcttcagtggaaaacaaagctcccaccctgcctcatgctcgctggcccagcctgggagtttcaaattctaaagccagagcaagcgtgaaaaatattcaaaatacagatgcttctggaaaacccctccctggggtgggggtgaggaagtgtcctatgcccttccttccctgagtccagttccatccttccccaccaccatccctcccattattattattaataatggccaccaccattattagccttttgcctgttgctgctggcagaagacaaacttcactatttccctgagatgtgtagccatcagcactaacataataaacataagaattttcaaaaaaaaaaaaaaaaaaaaaaaaaaaaaaaaaaaaaaaaaaaaaaaaaaaaaaaaaaaaaaaaaaaaaaaaaaa

SEQ ID NO: 70 - DNA, 453 bp, Rattus norvegicus
  misc_feature (1)..(453): n = a or c or g or t
caagaggaaagtggtgtcatggatagatgtttatgcacgtgccacatgccagccaagggaggtggtggtacctctgagcatggaattcatgggtaatgtggtcaaacaattcgtgccaagctgtgtgactgtgcagcgctgtggtggctgctgtcctgacgatggcctggagtgtgtgcccattgggcaacaccaagtccgaatgcagatcctcatgatccagtacccgagcagtcagctgggggagatgtccctggaagaacacagccaatgtgaatgcagaccaaaaagaaaggagagtgctgtgaagccagacagccccaggaccctctgcccacgctgcaccnagcgccgtnagcgccctgatccccggacctgccgttgccgctgcagacgccgccgcttcctccattgccaagggcggggcttagagctcaacccagacacctgcag

SEQ ID NO: 71 - DNA, 3112 bp, Rattus norvegicus
cgcagaacttggggagccgccgccgcgattcgccgccgccgccagcttccgccgccgcaagatcggcccctgccccagcctccgcggcagccctgcgtccaccacgggccgcggccaccgccagcctgggggcccacctacactccccgcagtgtgcccctgcaccccgcatgtaacccggccaacatccggcgagtgtgccctcagtagcttcggccccgggctgcgcccaccacccaacatcagctctccagctcgcacgtccgggatggcagcggccaaggccgagatgcaattgatgtctccgctgcagatctctgacccgttcggctcctttcctcactcacccaccatggacaactaccccaaactggaggagatgatgctgctgagcaacggggctccccagttcctcggtgctgccggaaccccagagggcagcggcggcaataacagcagcagcagcagcagcagcagcagcgggggcggtggtgggggcggcagcaacagcggcagcagcgctttcaatcctcaaggggagccgagcgaacaaccctacgagcacctgaccacagagtccttttctgacatcgctctgaataacgagaaggcgctggtggagacaagttatcccagccaaactacccggttgcctcccatcacctatactggccgcttctccctggagcctgcacccaacagtggcaacactttgtggcctgaaccccttttcagcctagtcagtggccttgtgagcatgaccaaccctccaacctcttcatcctcagcgccttctccagctgcttcatcgtcttcctctgcctcccagagcccacccctgagctgtgccgtgccgtccaacgacagcagtcccatttactcagctgcacccacctttcctactcccaacactgacatttttcctgagccccaaagccaggcctttcctggctctgcaggcacagccttgcagtacccgcctcctgcctaccctgccaccaagggtggtttccaggttcccatgatccctgactatctgtttccacaacaacagggagacctgagcctgggcaccccagaccagaagcccttccagggtctggagaaccgtacccagcagccttcgctcactccactatccactatcaaagccttcgccactcagtcgggctcccaggacttaaaggctcttaataacacctaccagtcccaactcatcaaacccagccgcatgcgcaagtaccccaaccggcccagcaagacacccccccatgaacgcccgtatgcttgccctgttgagtcctgcgatcgccgcttttctcgctcggatgagcttacacgccacatccgcatccatacaggccagaagcccttccagtgtcgaatctgcatgcgtaatttcagtcgtagtgaccaccttaccacccacatccgcacccacacaggcgagaagccttttgcctgtgacatttgtgggagaaagtttgccaggagtgatgaacgcaagaggcataccaaaatccacttaagacagaaggacaagaaagcagacaaaagtgtcgtggcctcctcagctgcctcttccctctcttcctacccatccccagtggctacctcctacccatcccccgccaccacctcatttccatccccagtgcccacctcttactcctctccgggctcctctacctacccgtctcctgcacacagtggcttcccatcgccctcggtggccaccacctatgcctccgtcccacctgctttccctgcccaggtcagcaccttccagtctgcaggggtcagcaactccttcagcacctcaacgggtctttcagacatgacagcaaccttttctcctaggacaattgaaatttgctaaagggaatgaaagagagcaaagggaggggagcgcgagagacaataaaggacaggagggaagaaatggcccgcaagaggggctgcctcttaggtcagatggaagatctcagagccaagtccttctagtcagtagaaggcccgttggccaccagccctttcacttagcgtccctgccctccccagtcccggtccttttgacttcagctgcctgaaacagccacgtccaagttcttcacctctatccaaaggacttgatttgcatggtattggataaaccatttcagcatcatctccaccacatgcctggcccttgctcccttcagcactagaacatcaagttggctgaaaaaaaaaatgggtctgggccctcagaaccctgccctgtatctttgtacagcatctgtgccatggattttgttttccttggggtattcttgatgtgaagataatttgcatactctattgtactatttggagttaaattctcactttgggggagggggagcaaagccaagcaaaccaatggtgatcctctattttgtgatgatcctgctgtgacattaggtttgaaacttttttttttttttgaagcagcagtcctaggtattaactggagcatgtgtcagagtgttgttccgttaattttgtaaatactgctcgactgtaactctcacatgtgacaaaatacggtttgtttggttgggttttttgttgtttttgaaaaaaaaattttttttttgcccgtccctttggtttcaaaagtttcacgtcttggtgcctttgtgtgacacaccttgccgatggctggacatgtgcaatcgtgaggggacacgctcacctctagccttaagggggtaggagtgatgtttcaggggaggctttagagcacgatgaggaagagggctgagctgagctttggttctccagaatgtaagaagaaaaatttaaaacaaaaatctgaactctcaaaagtctatttttttaactgaaaatgtagatttatccatgttcgggagttggaatgctgcggttacctactgagtaggcggtgacttttgtatgctatgaacatgaagttcattattttgtggttttattttacttcgtacttgtgtttgcttaaacaaagtgacttgtttggcttataaacacattgaatgcgctttactgcccatgggatatgtggtgtgtatccttcagaaaaattaaaaggaaaataaagaaactaactggt

SEQ ID NO: 72 - DNA, 1871 bp, Rattus norvegicus
gttattctcgtcctgactactttccaagtgccactggtaattgtgagttttggacagtccaagttatatcgcagtgaggattacggaaagaattttaaggacattacgaatctcatcaataacaccttcattcggacggagttcggcatggctattggtcccgagaactctggaaaggtgatattaacagcagaggtgtctgggggaagccgaggaggaagagtgttcaggtcatcagactttgccaagaactttgtacagacagacctcccctttcatcctctgactcagatgatgtacagccctcagaattctgattacctgttagctctcagcactgaaaatggcctgtgggtgtccaagaattttggggaaaaatgggaagaaatccacaaagcagtatgtttggccaaatggggaccaaacaacatcatcttctttaccacccatgtgaatggctcctgcactgatcttggtgccctggaattatggagaacatccgacttggggaaaaccttcaaaaccattggtgtgaaaatctactcatttggtcttgggggccgtttcctcttcgcctctgtgatggctgataaggatacaacaagaaggatccacgtgtcwacagaccaaggggacacatggagcatggcacagcttccctctgtgggacaggagcaattctattctattctggcagccaacgatgacatggtgttcatgcatgtagatgaacctggagatactggatttggtacaatctttacctctgatgaccgaggcattgtctactctaagtctctggacagacatctctataccaccacaggcggggagaccgactttaccaacgtgacttccctccgtggagtctatataacaagcacactctcagaagataattccattcagagcatgatcacttttgaccagggaagaaggtgggagcatctgcagaagccggagaacagcaagtgcgatgctaccgcaaagaacaagaatgagtgcagccttcatatccatgcttcttacagcatctcccagaagctaaatgttccaatggccccactctccgagcccaatgccgtgggcatagtcatcgctcacggtagtgtgggagacgccatctcggtgatggtcccagacgtgtacatctcagatgatgggggttactcttgggcaaagatgctagaaggaccgcattattataccatcctggactctggaggcatcatcgtggccattgaacacagcaaccgtcctatcaatgtgattaagttctccacagacgaaggccagtgctggcagagctatgtgttcagtcaggagcccgtctacttcaccgggctggcttccgagccgggagccaggtccatgaacatcagcatctggggattcacggagtctttccttacccgccagtgggtctcctacacaattgatttcaaagacatccttgagcgcaactgtgaagagaatgactataccacatggctggcacactccactgaccccggagattacaaagatggctgcattttgggctataaagagcagttcctacggctacggaagtcatccgtctgtcagaatggtcgagactatgttgtggccaagcagccatccatctgtccctgttccctggaggactttctctgtgactttggctacttccgtccagagaatgcctcagagtgtgtggagcagccggaactgaagggtcatgagttagagttctgtctgtatggcaaagaggagcacctgaccacaaatgggtaccggaaaatcccaggagacagatgccaagggggaatgaatccggcccgagaagtaaaagacttgcagaagaaatgcacaagcaacttcttaaaccc

SEQ ID NO: 73 - DNA, 3365 bp, Rattus norvegicus
ctggaaatggcggcgtcgagcgggaggtctcagtcttccctgcacaggaaggggctgatggcggctgacaggaggagcaggattttggcagtgtgtggaatgcatcctgaccatcaggaaactctgaaaaagaatcgagtggtgctggccaaacagctgctgctgagcgaactgttagaacatctcctagaaaaggacattatcactttggaaatgagggagctaatccaggccaaagggggcagtttcagccagaatgtggaactcctcaacctgctgccaaagagaggaccccaggcttttgatgccttctgtgaagccctgcgggagaccaggcagggtcacttggaagacttactgctcacaaccctctctgatatccagcacatactcccaccgttgagctgtgactatgactcaagtctccccttctcggtgtgtgagtcctgccctcctcacaagcagtcccgcctatccacagatactatggaacactccttagataatggtgatggtcctccctgtcttcaggtgaagccatgcactcctgagttttaccaggcacactaccagctggcctataggttgcagtctcagcctcgtggcttggcactggtgatgagtaatgtgcacttcactggagagaaagacctggaatttcgctccggaggggatgtggaccacactactctagtcaccctcttcaagcttttgggctacaatgtccatgtgctgtatgaccagactgcacaggaaatgcaagagaaacttcagaattttgcacagttacctgcacaccgggtcacagactcctgcatagtagcactcctctcacatggtgtggaaggtggcatctacggggtggatggcaaactgcttcagctccaagaggtttttcgactttttgacaatgctaactgtccaagtctacagaacaaaccaaaaatgttcttcatccaagcatgtcgtggagatgagacagatagaggggttgaccagcaagatggaaagaaccatgcacaatcccctggatgtgaggagagtgatgctggcaaggaggaattaatgaagatgagacttcctactcgctcagacatgatatgtggctatgcttgccttaaaggcaatgctgccatgcggaataccaaacggggttcctggtacattgaggccctcactcaggtgttctctgagagagcttgtgacatgcacgtggccgacatgcttgttaaggtgaatgcccttatcaaggagcgtgaaggctatgcccctggtacagaattccaccgatgcaaggagatgtctgagtactgtagtactctgtgccagcagctctacctgttcccaggctacccacccacgtgatgccacctgctagtcatgctgttggaggccactggaccacggggcacaatggagacttctcttcaagatgtttttgttctgtctactccctcagggatatgagattctcccaagcttgtttcctgtcagccatctccgtctttgggggtgaaacttgaggacagctcctctggtgtggtgttctcttcctgtagagccagctatgaatggatctgttgccagaagcattttggctatagccaatgagactagaaaatgacattgtgaacacagtattattgtggggagagggcatacggatttctcaatgtttgtgatatttttgttcccagggctcttagggatactttgattattgcttttttatatcagttaaggactttcagatatcatctcctactttttttttcatatctgcaacctcattttttccatagtgaagatttggaaaatgtcccaatttaatgcagttgttgtcatctgtcatgaagcggcaggtgagaccctgctacttgagcagaagtttcagacctttgagttcaggccttaggtgaaggacagtccctcagcttttccattggtttctttgtgttcattgtacccagcttttgagcagagcctggggtctgcttgctgtgacactggaagttatatacgtttccctggttatgaattgtcactgaaatgaaccttattgggcatatcaacataaaaatgcagtgacaggtgagtgtgctgtgtctcatactgtcacttgtcaccaggatatctctccttccttactgtggtttctgctgtgcagttaaactacttgatggctgacctccaagaaccctcttgctttgcattggttcccctccttgacccattcactgcttctgccacgtctgtgaaatcttcccttgtagaatgtttctggccacttaagcagtactgcttcagcataaggtttcttcggttttctgcggcagtgtctccattctcactgtttctctgttttagtgaggatagtactataggtgatataacctagaagcacttatctctgctcttatgaaactttcttattcttaaaaaccttttgcatttccatttttttcctcttttccagtttattctccacatgacagagtagttttgtttttttttaatatctggtgatgtcactcccttgttaagaacattagcttcctgttacacctcatctaaaattcaaattcttacccagtttatgagatccggcttttacgttccctttggatctcattagatggtgatttctctctgtgttcagcccctcagttcctcagctcagtgttgcaagtgttctgagctcttctttaagatagtctctgattcttgagtctggcggaggcctcttgaccgtgatgttgatgaagtaagtcttctgtacctccttaggatggcatcatgttggtccttgtgcttactgcaggttgtaatggcacgtttcacttgctccctccaaagctgaaggctccaagagagcaggactgtactccttacttattggctattcagtacggcacttactaggtcttcaatgaatgtttcctgagtaaaggaaggagacaagcagctaactttagttagagcctatcttttgcgatttctaaattgctattatagtactcagtttaattagtatttgtactcttgtgggggtttttttccaggtgttttatttttatccactgttttgttgtttttttacattgtttgaagatgtatcacgtgtgagacaacttctttcacatctccatggtgccccgcaaatttgaggcctatggtagttgaggtgctcaattaatgtttgtcgtatgaaccaggtggtttgaagacttgctgccaaattctgcctttgggtcagtataggatgcatgagtggtagactcttcacacttcccactgccaagattttgtattgccatcaggtgccaaataaatgtcgatacttactactgacaaaaaaaaaaaaa

SEQ ID NO: 74 - DNA, 1720 bp, Rattus norvegicus
ggagaacgctgccgggggaaattggcgactgaagcggcctgggccggatttagcattcagaccttggcgtcaggagatacgaggtcctccaaaaaaagaccagtgcctcggatgagccccctcacagagagatgaaggggcagcagaaaacagccgaaaccgaagaggggacagtgcagattcaggaaggtgcagtggctactggagaggacccaactagtgtagctatcgccagcatccaatcagctgccactttccccgaccccaacgtcaagtacgtcttccgaactgagaatgggggccaggtgatgtacagggtgatccaggtgtctgaggggcagctggatggccagacagagggctctggcgctatcagtggctaccctgccactcagtctatgactcaggcagtaatccagggggctttcaccagtgatgatgctgttgacgcggagggaacagctgccgagacccactacacttacttccccagcaccgcagtgggagatgggtcagggggtacgacatctgggagtacaaccgccgtggtcaccacccagggctcagaggcactgctggggcaggcaaccccgcccagcacaggccaattctttgtgatgatgtcaccacaagaagtgttacagggagggagccagcggtcaattgcccccaggacccacccttattccccgaagtcagaggctcccaggacaacgcgagatgagaaacggagggctcaacataacgaagtggagcgccgccgccgggacaagatcaacaactggattgtacagctgtccaaaatcatcccagactgctctatggagagcaccaagtctggccagagtaagggtggaatcctgtccaaagcctgtgactatatccaggaactacgtcagagcaaccaccggctgtctgaagagctgcaggggttagatcagttgcagctcgacaatgacgtgcttcgacagcaggtggaagatcttaaaaacaagaacctgctactacgagctcagttacggcaccacggattagaggtcgtcatcaagaatgacagcaactaactgtggggactcaggggctttgggcccgagaactgcacatagcccaggagcaacaggctgaccccatgcccctctctttcactgcctacttctggcgtgggactcgggggagttgggcaagtgtgattttgaactgaggcctgtggcatggcagtctgcagtgagtgctgggaaaccgtgtggacacgcaccgccagccttgcctgcccccaccgcgcagtccccgggccctggtgctcctttggcacactgcatgtgctgtctccttggtggacactggacacacgaaatctgggctcgccgcgtgcttgcttagagtgcctggcagagggtctgtgggccgagtatttcactggttcttcctttctctgaagcagaagttaagatacatacctgattactctggggagcaggcttactcaagaggtggggaaggatgctagcgggctgctctcccaggagtagagggggcagtgagcagccgaagcctctgcagaaggccctggagtcagggagagctataggcagggcgggttcacagagagcccgccctgttccaggggtggttctttttatttctttacttttttttttttaagataaaattgtttagagccacaaaaaaaaaaaaaaaaaaaaaaaaaaaaaaaaaaaaa

SEQ ID NO: 75 - DNA, 1242 bp, Rattus norvegicus
ggcacgagaagagaacagatcgctttggaaaccggactgcaggattgtgatccagttctgagctggtgataaacactccttgtgacttttggtcaattcagctaccagattccagccaacatgaccctcgcagcctataaggagaagatgaaggaactcccactagtgtctctgttctgctcctgttttctgtctgatcccctgaataaatcatcctacaaatatgaagcagatacggtagacctgaactggtgtgtcatctctgatatggaagtcatcgagctgaataagtgtacctcgggccagtcctttgaagtcatcctgaagccaccttcctttgacggggtgcctgagtttaatgcctccctcccaagacgtcgagacccatcgctagaagagatacagaagaagctagaagcagcagaggagcgaaggaagtaccaggaagctgagctcctaaaacaccttgcagagaaacgagagcatgagcgtgaggtaatccagaaagctatcgaggaaaacaacaacttcatcaagatggcgaaagagaagctggcccagaagatggagtccaataaggaaaaccgggaggcccatctggctgccatgttggagcggctgcaagagaaggagccgcctgctgcgcggtgactcccgggaccgatcggtggcctcgtcccatggacaagcacgcagaggaggtgcggaaaaacaaggagctgaaggaagaggcctccaggtaaagcccagaggccaaggaagtttccaggacagccggacagctcccgcagcaacctggttccagcagcatcggccgctggctgctctcccagcactggggttcggggggaggggggtggccaaaggggcgtttcctctgcttttggtgtttgtacatgtaaaagattgaccagtgaagccatcctatttgtttctggggaacaatgatggggtggagaggggacagagagtgtgtggaaaaggaggtgaagatgacccgaggactttgtacactgtccactgactgcagacttgccaaggcccccgcttttcagcctctgcctggacattcggcctccaggttcctagtggagagaagatgtgacagaagttcagagtgaagggccgagtcctggtggggtggtgtgcagggccagcaggacgagcccgtctggatggagtgaaacctacctgagcgggtgggataaggtctgtgtgcgtctgttcattgtcatcttttct

SEQ ID NO: 76 - DNA, 535 bp, Rattus norvegicus
ctgcatatctacaagtaaacacagtgtctctgactctacaggaaccacagatcacgtgggacagaactgctttttaactggatttaactattttgtagaatgaaaccataggctgaattatgaaatcatataatcactgaatccttctgccttcatctcaatgttcctgtaatttgcaacataaaaatgaatgttatcagatgccgtgatgccttaaaatttattttaggagctgtttctaaaccaaatctctgccccatgggttttcaaacttaactgaacaattctaatatgccaatatacaaatcagaacaaatcttcaagcttggaaggaaactgtcataattcttagaataccttacctaaaagttgagtaggaattttaccagtcataattttattcaagcaatttaaaatagtttgaattgtttcaatgtcaaagataatagagcagctgtcatattctatggttagttattaaatttaacctaataaatatggtttataaaaataaaaaaaaaaaaaaaaaaaaaaa

SEQ ID NO: 77 - DNA, 5297 bp, Rattus norvegicus
gaattccgccgcgccgcaaacaggctcttacaggcgcgcacacagacacgcgcgcgcgcacacagcggggttcccggaggcggcggtggccgcatccccagcagcgactcgcctcgaagtgacaggagcctgctggctagtttctctgtgagtgctgaaaaccatttgagaggattctcaacaaagcaccctggggtctgtgcacaggattcgatcagctagacctcccttgctgctgcacctaaccatctggtcttgaacaccatcatggccaaaccttacgaatttaactggcagaaggaggtaccctctttcttgcaagaaggagcagtttttgacagatatgaagaggaatctttcgtgtttgagcccaactgcctcttcaaagtggatgaattcggcttcttcctgacctggaagagtgaaggcaaggaaggacaagtgctagaatgttccctcatcaacagcattcggctggcagccataccaaaggatcccaaaatcctggctgctctcgagtctgttggaaaatctgaaaatgatctggaagggcggatattgtgtgtctgcagcggcacggatctggtgaatattggcttcacttacatggtggctgaaaacccagaaataactaagcaatgggtagaaggcctgagatcaatcattcacaacttcagggcaaacaacgtcagtccgatgacatgcctcaagaaacactggatgaaactggcctttctgaccaacacaagtggcaaaatcccagtgaggagtattactagaaccttcgcatcagggaaaacagaaaaggtgatctttcaagcactcaaggaattaggtctccccagtggaaagaatgatgaaattgaacctgctgcatttacctatgaaaagttctatgaactgacacagaagatttgtcctcggacagatatagaagatctttttaaaaaaatcaatggagacaaaactgattatttaacggtagaccaattagtgagctttctaaacgaacatcagcgagatcctcggctgaatgaaattttattcccgttttatgatgctaaaagagcaatgcagatcattgagatgtatgaacctgatgaagagttgaagaaaaaaggcctcatatccagtgatggattctgcagatatctcatgtcagatgaaaatgcccccgtcttcctagatcgcttagaactttaccaggagatggaccaccccctggcccattacttcatcagttcctctcacaacacctatctcaccggccggcagtttggcggaaagtcttcagtggaaatgtaccgacaagtcctcctggctggttgcaggtgtgtggaacttgactgttgggatggaaaaggtgaagatcaggaaccaataataactcacggaaaagcaatgtgtacagacatcctttttaaggatgtaatccaggccatcaaggaaacagcgtttgtcacatcagaatatcctgtaattctctcctttgaaaaccactgcagcaaatatcaacagtaccagatgtccaagtattgtgaagatctatttggggatcttctgttgaaacaagcacttgagtcacatccacttgaaccagggaggctcttgccatctcctaatgacctcaaaagaaaaatactcatcaaaaataaaaggctgaagcctgaagttgaaaaaaaacagctggaggctttgaaaagcatgatggaggctggagaatcagctgccccggccagcatcttggaagatgacaatgaggaggaaatagaaagcgcagctgatcaagaggaagaagcccaccctgaatacaagtttggaaatgaactttctgccgatgacttcagtcacaaggaagcggttgcaaacagcgtcaagaagggcctggtcaccgtagaagatgagcaggcatggatggcatcttataaatacgtaggtgctaccacgaatatccatccgtacttgtccacgatgatcaactatgcacagcctgtgaagtttcaaggtttccatgtggctgaagagcgcaacattcattataacatgtcttcttttaacgagtcggttggccttggctacttgaagacgcacgcgattgagtttgtaaattacaataagcgacaaatgagccgcatttaccccaagggagggcgagttgattccagtaattacatgcctcagattttctggaacgctggttgccagatggtttcactgaactatcaaaccccagatttagcgatgcaattgaatcaaggaaaatttgagtataacggatcctgcggatacctcctcaagccagacttcatgagacggcctgatcggacatttgatcccttctctgaaacccctgtggacggggttattgcagccacatgctcagtgcaggttatatcagggcagttcctgtcagataagaagatcggcacatacgtggaagtcgatatgtacgggctgcccaccgacaccatacggaaggagttccgaacccgcatggttatgaacaatggactcaacccagtttacaatgaagaatcgttcgtgtttcggaaggtgatcctgcctgacctggctgtcctgagaatcgctgtgtacgacgacaacaacaagctcattggccagaggatccttcctctggatggcctccaggcaggttaccgacacatctccctgagaaatgagggaaacaaaccgttatcactgccaacaattttctgcaatatcgttcttaaaacatatgtgcctgatggattgggagatattgtggatgctctatccgatccaaagaaattcctttcaatcacagagaagagagcagaccaattgagagcaatgggcattgaaactagtgacatagcagatgtgcccagtgacacttccaaaaatgacaagaaaggcaaggccaacccagccaaagcgaatgtaacccctcagagcagctctgagctcagaccaaccaccacagctgccctgggatctggccaggaagccaagaaaggtattgaacttatccctcaagtgaggatagaagatttaaagcaaatgaaggcttacttgaagcatttaaagaaacaacaaaaggagttaaactctttaaagaagaaacacgcaaaggagcacagtaccatgcagaagttacactgcacacaagtggacaaaatcgtggcccagtatgacaaggagaagtcgactcatgagaaaatcctagagaaggccatgaagaagaaggggggaagtaattgccttgaaataaaaaaagaaacagaaattaagattcagaccctgacatcggatcacaaatctaaggtcaaggagattgtggcgcagcacacaaaggagtggtcagaaatgatcaacacgcacagcgccgaggagcaggaaatccgggacctgcacctgagccagcagtgtgagctgctgaggaagctgctcatcaacgctcatgagcagcagacccagcagctgaagctctcccatgacagggaaagcaaagagatgcgagcccatcaggctaagatttctatggaaaatagcaaagccatcagtcaagataaatctatcaagaataaggcagaacgggagaggcgagtcagggagttgaacagcagcaacactaagaagtttctagaagaaagaaagagactggcaatgaagcagtcgaaagaaatggatcagctgaaaaaggtccagctggagcacctagaattcctagagaaacagaatgagcaggcgaaggagatgcagcagatggtgaaattggaagccgagatggaccgcagaccagcaacagtagtatgaaactccagaatgcaaactgaagctggaagaccatagaacaccagaggatcacgcccagcttcagaggacagactccatggacaaaagctgttttcttttgtttttcttttatgtgtagacacggtgtaacctgaaaccacatggactggggatgaccaaatgttcttctacttaacaatttgactattgaatttctttggccaaccaaaagtagctatgtacacacacacacacacacacacacacacacacacacacacacacagaaatcccctattcctgacaggcagagttgaaccataatccacaacttaaacatgttggctaggggacagcatcacaagccagtgggcttggtgataacaactctgctttgtggtgcattaggacatgttcgagctgctgctggaaaaggaaaattagtgcattagtactttaatggcaagcgcatgcactagacgaaacaactccgtctacagtccattagcagaagtggtggtctgctatacaaatcactttgcagaactttctacacctaagttacctcatgagtaagtgccatgtctttaccatgccataagatgctaacttcctgtaaatgttgcagaatttgttaggacaatagagacacacaaaacggtgtacctgtgccaagctcatcagtgcgccaagggggactcagcaggctcgtttcggacagtttacagctgactctgctttgtaggaagtgcttctgcagatgcctcatgctgcaattcactacacactatcaggagggtggagtggctattggcaaatgtttgtaaatgtgaccatgtacaaagtatttatactccttaattctcatggttatagcgcaaagtcatctaaacattaccacacgacaagactagtaaacaggaatcatagatgttttgcatgatgcacaagcaccaattatgactaacccattgagacacagttaacctaacaccaaataaataccggttaagtcaatgtatggcacagaatattatttgactatcaagacttttagcataatgaaaaaagtctatatatatgtgtatatgaattatgtgggcattcttgatacttctagtttgaaaaaatacattaatttaattttacacaaaaatatttatgcagattttcagactttcatatcaggaaataacctttttatgtctgttaaatatccaaacgatttgctaccgtgttcatctgcatggtcttctcacctgctgtagttgccttgcaggtggtgcataaagtggacgggtgggatgagtcctgctgccccaacccagaggagcgtgcggagacccggtagcctaggagtcagattcctgattttaggatgcaaaacgccaacttaattgttgtatatggttgtacaaatagattctgtgtgttcctctgaggagggcagagaagagtatgataccatgaaggctgaaattcaacgtacaacttctctaataaaaaaaaaaaaaaaaaaa

SEQ ID NO: 78 - DNA, 8797 bp, Rattus norvegicus
  misc_feature (1)..(8797): n = a or c or g or t
agaagcagggcaagatggagcggagacgtatcacctctgcacgccgctcctatgcctcctccgagacgatggtcaggggccatggtcctaccagacacctgggtaccattccgcgcctctccctgtctcgaatgacgcctccactccctgccagggtagacttctccctggccggggcgctcaatgccggcttcaaagagactcgggccagcgagcgcgcggagatgatggagctcaatgaccgctttgctagctacatcgagaaggtccgcttcctggaacagcaaaacaaggcgctggcagctgagctgaaccagcttcgagccaaggagcccaccaaactggctgacgtttaccaggcagaacttcgggagctgcggctgcgtctggaccagcttactaccaacagtgcccggctggaggtggagagggacaatctcacacaggacctcggcaccctgaggcagaagtgagaaggggaataggaaaatggctagtgagcagagagactgaattgagagaggagcctggaagaagggtactgcctccccctaaggagagcctcttagctgctgtgtttcaaaagggagagctgtctttgttccctaatatgatgcagaatagccaggaagagactgaaaacttcagggatcagattcccagagagagctgagcattctgggtacttaccaccaagctgagggaggactgtgtgtgggtagccagggtacaagcaggcaggtgcttcagtcactgggcactatgaatggccagagaggtttgcgtccacaaggagggctcttggtctctgaaatataagaaatgcaagaaagagcaggcaggcctggatgccgggcccagatggctgtctacgacctgcttttgaccctgctcaagtcattttgattggttgtagctgtaaaggagaggtcatgatacaatctgtcctaaaagatggtaaccgaggtcaaactctggggcgtggtgctttgctgggtggtggatattcacgtgtccctctggtgcaggaggggcactggtgtcagtgacagtgggcgcacggtggtggatgcgcctctgggaacaagagcaggtggcaccaaccccgataaggcacctcagtaatgagttaaggaggaaggctcttatctgttcacgcgtcaccaggcctctgtgtaggaacctgccattgcttactcttcctgccactctaccgatcctgtgggatccgtttgtaacartcccctccctctggaggttcggatagggacccaagagtcctcaggaaaacctaaagcctgtactgtgttccctgtcccaggctccaagatgaaaccaacctgaggctggaggcggagaacaacctggctgtgtacagacaggtcagagagatgagaggaagggtggggagggaaggcggaggcccgccaccaaacaccgcagttgtctgcttccaagatccccacaaggagggggaagacaaagttggaaattttagtagctaggaccctggggtcaaagagattctctccctgctccaggaggcggatgaagccaccttggctcgtgtggatctggagaggaaggttgagtcgctggaggaggagatccagttcttgaggaagatccatgaggaggtgaggccagggagggggagggaggggccttacgagaaactgcaggtaatagacagagacgctcacagaggnaaacngagaaaccaaatttcaggaagaaaacaaaaacaagagaaagagtnaagacagagacttagggagatgtgtccagtatttactacccgtgnaaacacacgcaggccttccgccgccatgttctaagaagcacagaaccgagtctgagtttctccttcacatcagctctcagccttatcactacctcttccacaactgtagggaccttgaggcctagagagtgaaacacacccaaagtcacacagctagaacccctctagacctgtcacagtggtatgcatctcagcctgtgagtggtagacgcggaacgtttgaactgttcaaggccaatttcwgcnacannaghaaactgaaaccagccacgcnccgcncgcgcacatctattctcttacctcagaacctngctgcaagacatattyattcatgcctggttcctgactatgcagtcctgagaggaaggcacctcaaattctacttccatgcccattagacgctttacttttactttttgacaggatatcactgtgtagctggcctggaacatgcacttcctccagtaacatctgcctcatttccgtgagccattgctataaatggcagacagaggcgtgagtctgggagagtgcagcctaggccgtagcttgagccttaataccccttcttttaccttattaggaagttcgagaactccaggagcagctggcccagcagcaggtccacgtggagatggatgtggccaagccagacctcacagcggctctgagagagattcgcactcagtacgaggcagtggccaccagtaacatgcaagaaacagaagagtggtatcggtccaaggtacctgtggggcagcttgcctcttccaggaagtcttcctgctccctcctgaagaataaaggaaggaaggaagctagggaagggtaacctatctaggtgtccagtcttgcccagagagaggagacttgcccagaaccacgcaagcattattaacttcccaaactactcttggttactgctattataagtaatatcagtaatagttaataatagctaaaggctcaccagtttgctcagtgtcacacagctcctaagtgacaaagggatagcgtttcctatcctaacccatatcatcagagagcctgctttttgatgcctctgccagcctatgccctgcattaccgaacatctactgtgtgtcacgttctttttttctttttttggagctggggaccgaacccagggccttgcacttgctaagcaagcgctctaccactgagctaagtcccaaccccgtgtgccacgttctttagtccagatgaggccagcgtttatacagactgtaggaggcagggacgatgggggatggactaggggtgggacttgtgctagacaggcagcctagagactcaggagaagagggaagggcatctcaggtggagaacaggggctgtgaggaggcctgagacagaaaagcacagagaccagaaatgtcgctgcccagggcgccaagcccagtgtgagttaatgagcctcacatgcagggacagtctgggaggatgaaggcctaagaagttcttgggctacagttgttcctcctaagggagccctgaggttcctggtttttcagtgatcatgtatatctcccagctcaggcagctctctgggctgtgccttgcgcactttccctcaatttttggtcctctctgggtttagtttgcagacctcacagacgttgcttcccgcaacgcagagctgctccgccaggccaagcacgaggctaatgactatcgccgccaactgcaggccttgacctgcgaccttgagtccttgcgcggcacggtgagcacggatcactggttggatggggcagcaagaggttgctggagggggacagggatggagggaccggggtggcataggcgaacacggaagagatcaggggttgcagcctcgaagtttctcaaaatctcccggccaagcgatcagttccatcccgcagaacgagtccttggagaggcaaatgcgcgaacaggaggagcgccacgcgcgggagtcggcgagttaccaggaggcactcgctcggctggaggaggagggccaaagcctcaaggaggagatggcccgccacctgcaggagtaccaggatctactcaacgttaagctagccctggacatcgagatcgccacctacaggaaattgctggagggcgaagaaaaccggtgagctctacctcagcccgagaattcctcttgttcctttacagtactccggagttagccttgtatccttcccacccagagtgttcagcctacgaacaatagatattcaagaaatgtctgaagaatagatgggtccaactactggtaattctcgggactgaggacttgagttattccccagattaagtggcttaccacaagcatggccaacaaaaatggaatttcccatggtctgaagggcttgttctgcctctatgaagttattgtgacttaaaaaaaaaattccatctccaaagcctccttcctggaagtattctgtgggggcagataacacagtcctgcagacacttccggctcctggagagtgttggctgctgggttgaaagttggtggtggaggctggagagatagttagggctttgggttccaacatccatcttatggcttgcaatggcttgtagtaacactccagttccaggggaacccacatctgccattgtatgtgtgtgtgtgtgtgtgtgtgtgtgtgtgtgtgtgtgtgtgtgtgtatgtatgcatgcatgtatgtatgtatgtatgtatgtatgtatcagtcattatgttgctgctttagtcccagcacttgagaggaagaggccagcagatctctgtgagtttgaggctaacctggtatatatattgaatcagcgccatatagagaggctttgtaagaaaaagttggcgaagagaaagagaggagaggagacagagaggagcagaaaggagagagagcaggagagagacagacagacagacagacacacacacgcatgcacacaggacagagagaaaatgtgtgtgtgtgtgtgaaagagagagagagtgtgtgtgtgtgtgtgtatgtgagtgtgtgtgtgtatgtgtgtgtgtgtgtgtgtgtgtgtgtgtgtgtgtgtgtgtcctggtaaagggctttgagattttcatgctggccctggaccagccctggcctggggatgtcctagggcagcctcctcatccctatccctccttttccagcatcaccattcctgtacagactttctccaacctccagatccgaggtcagtatagtggggccttgtgggaaagggtaatgaatcccctccctcctcccccaggcctgtgaactgctctcatggactgggaggcaaagagacccacgctctccttgagagcttcgtgaccctccacggagaccctagatggagtgcagaatcttagggcttatagctggtccctgcctccctctgccctgtgtccccatcccctggaaaacccaacaggtctcaactgatgccaggtctgcaagccatgaacaagctccgccttctaagtgttttgtgttcttgttttttttttttttttttctcctctctctcttaactgcttgtcactacagggggcaaaagcaccaaagaaggggaaggccacaaagtcacaagacatctcaaaaggctcacaatacaagttataccaatacaggctctcgccagattgtaaacggagtcctgccagcactccgttagacacgtgcacttcagttgtgtacttttcccggcttgccttcttcctcccaggcctcttctaagggactgtaccgtgtcctttgtccagaaccttcagtacccacgctaggtcctggctctgtgtaattaggttatactgatagagctagcctacgttaaaggttaggtcatgctaacagagctagcctatgctaacagagctagcctatgctcaaggtgaggtcatgctaacagagctagcctgtgttaaaggcagcatgtctctgggagctcaaaggagatgctctgacccctctgagcaaatgcctctgcctcaccacttttgtgtcgctaggtggtccccttggattgcagtgcctgtgggcaggctctgtgtttgattcatgtgtccccagagttctattgcttcattcagtgctgactcagcccagaggttccccctggatggctgctcttgtagtgaataaactctaggttccctgctcttcgttttacatattagtgagtggcgacacgtatattttcctctctaagggggttggatcaaattacgttttactggtatgtggcccttaaatgattcttagatatgggggaagattccatttaggaacattggccgtgcatattgcagggtgtaattgagctttagaaagttaaccatgctggccaggcaaaggtgccaaataccaggcagtcaaaggtcactagagccagataagtgacagggaaataagaatggggaaaggtccgtgcgtattaaccactaatctgcaccacgtggtatacgtcagtgagttgacactcgcatgtccaggagtagtcactatgagcccattttgtaagagaggaaactgaggctccttccttggtgcagcccttggctgtctctcagccaggtgccagaacagaaggcagagcgggctacaggacagcagcagggtgtgcccagcgctgggggacagatgggagtctccagtcacttcggaaaagtcatgcttttcgctgcctagctagttagccccgtccgtattcacgatcctgggtgcatgatggggaacttgggtgcagggcaggatgtctagtgtcccaagagcccacggagacctcctctcctcgtacctgcagaaaccagcctggacaccaaatctgtgtcagaaggccacctcaagaggaacatcgtggtaaagacggtggagatgcgggatggcgaggtgaggaaacgttccagtggccccggggagttcttgaggctgtactggagaaagcctggtactagctcactgaaggtccttattaactaccaggagagctctggtagaagggatgggccttgaatgtaattctccttttccagctctttcatgggtggcgtgctaagggcaacctgtatatggaggccaccatctttctggaacacttggtggagggaggctttcaaattttactcagaagaactttccataggggaattggaagaggggctagacatagaatggccgtcttcatttgttgggatgttagcagcaatggttgcccttacgtcatagtcctctacaagtggcatttcatatctcaatgtgtgatgcaatcaagccgatagtcctggaagacacatccagggcagtcaggggctcgcctcggggatgctcagcctagcaaactggatctgggattctggagcccctaactctgtgctgtgactcttccctctgcctgcaggtcattaaggagtcgaagcaggagcacaaggatgtgatgtgaggtgtgcccagctggcggcccttgccatacagtgtgagggcctaaagctccctcctcagatagtcttgtttgctaggcccaattcccatccacaccagtgctccccttccttctgtttttatgcccacggctcggtcagtgcggagtctcatggacggcacagaccaccctgcatctccaactaacaggatactcaccccaaaggggcaatcaggaggggaggacccccctccccccagctgggttagaactggaagaaagaggaaagacaggggcagggagacttaacaaatcccttccttcatccttgttgttatggaaaccgttgccagagctggaggtctctgggaactggactttgagttttcataggctgctggagcaagacaaacattcagacagaaaggaaaagttcccgaggcaaagaatctctagccagaggcctaggcatctggaagaaccctgacgatgtaggagtgggtagggcagacttgctacctggaatggccactaaggcagtcctgaagggcccccctccggagggatgaccctcgtgtatcggccccactgagcagccctgcaggttgatgccccacgagcctgtgaaaacttggttcttggcatgtggcaggctctatagcataagtggagagggaaggtgtactggagggtatagaggagggctctctggcccctaagtatggatgcggagaggggggagcccaggaaggctaccccgctcaggctgcaggggtgccatggcggaggaaccggtggagataacttggacaatggagttggaagttgtaggcaactagttacacttggctctgaatccttggaatcaaggaaatgacctgttctctcaaagacactgaaacaggagagagggacttccatccactgggcagggtacaggcgcgtctcagttgtgaaggtctattcctggttgctcagtccccaactgcgcatcaccctgggcttctcaacctggaagagtccacaaccatccttctgaggccctccatccccacaaccactagctgttgttctccaagccaagggccccattccctttcttatgcatgtacggagtatcgcctagactttaagcgtccatcctgtttgaaagtttgggaaactgacacacgttgtgttcaagcagcctggtgtggagtgccttcgtattagtgtaccctctcggaagctggttggtgggcaggtgaggaagaaatggagctgaaagtgtcccctcagttgtcctttcctccccctctaaggtccctcacttttcccaggacatcgtacactcccccccttgtcacctctgctaaccttcagagcagtactgtcacctttactcactgggcagaaataaagacagtgtcagaggcttccacagagkatctgatttgttcagaaggtggggtgaggacagacaagacccaaccttgctcgttatcaccaccgaatgtctagcgagcctaaacttccacaacaaaccctccacagcagcagctggcgttaaatccgcctccaacgacgaggtgccct

SEQ ID NO: 79 - DNA, 948 bp, Rattus norvegicus
atgcagacccttagaaaggaaaactgcagctcagtgtccgagttcatcctcctgggcttctccagcgaatcccagatcagaatggccctgtttatcttttttcttcttctctacatggtcaccctcctgggcaacggactcatcgtcgctctgatttacctagactctcgcctccacacgcccatgtacttctttctcagcatcctctctttggtagacatgagctacgtcactaccactgtgccccagatgctggttaacatggtgtgtccaaaaaggaccatctcctggggtgcttgtgtagcccagatgttcatcttcctggtcctgggtattgccgagtgtgttctctacgccatcatggcctatgacaggtacatcgccatctgcttcccccttcactattctgtactcatgagccgtcttgtgtgtgccaagatggttacaatatgctcctccatcagcgtcacgggcgctctgatctacactgtcttcaccatgcgtctgccctactgtggtccctacaagatcaaccacttcttctgtgaggtccccgctgtcctgaagttggcctgtgcagacacatccttcaatgaccgcttggacttcatcctgggtttcgtcttacttttggtccctctctccctcatcctggcctcttatgcctgcatctttgtctccatcttaagaatccgctcatcccaggggagactcaagtccttctccacatgtgcctcccacatcactgtggtcaccatgttctatgggccagccatggtcatgtacatgaggcctggttcttggtatgacccagagcgggacaagaagctggctctgttctacaacgttgtctctgctttcctcaaccccatcatctacagcctccggaataaggatgtgaagggcgcttttatgaaagtactcggaggcagagggacagcccagtga

SEQ ID NO: 80 - DNA, 2128 bp, Rattus norvegicus
gtcacgggaagatccgtcgcgccgaggacgctggttagtctcgctttgggttccggctgcgtcgggcgtgcgtgtagctcgctagaactatggcgtccgggcctcacccgacatcgaccgctgccgccgcctctgcctcgtccgccgccccgagtgcgggcggctccagctccggcacgacgaccacgacgacgacgacgaccggagggatcctgattggcgaccgcctgtactcggaggtgtcgcttaccatcgaccactcggtgattccggaggagcggctctcgcctaccccgtccatgcaggacggcctcgacctgcccagcgagacggacctgcgcatcttaggctgcgagctcatccaggccgccggcattctcctccggctgccgcaggtggcgatggctacggggcaggtgttgtttcatcgttttttctactccaagtctttcgtcaaacacagtttcgagattgttgccatggcctgtattaatcttgcatcaaaaattgaagaagcaccaagaagaataagagatgtgattaatgtattccaccacctccgccagttaagaggaaaaaggactccaagccccctgatccttgatcagaactacattaacaccaaaaatcaagttatcaaggcagagaggagggtgctaaaggagttgggattttgtgttcatgtcaagcatccccataagatcattgtaatgtatttacaagtcttagaatgtgaacgtaaccaaaccctggttcagactgcctggaattatatgaatgacagtcttcgaaccaatgtttttgttcgctttcaaccagagactatagcatgtgcttgtatctaccttgcagctagagcacttcaaattccattgccaactcggccccattggtttcttctttttggtaccacagaagaggagattcaagaaatctgcatagagacacttagactttataccaggaaaaagcctaactatgaattgctggaaaaggaagtagaaaaaagaaaagtagccttacaggaagccaagttaaaggcaaagggattgaatcttgatggaactccagccctttccactttaggtggtttttctccagcctccaaaccatcatcaccaagagaagtaaaagctgaagagaaatcaccagtttccattaatgtgaagacagtcaaaaaagaacctgaggatagacaacaagcttccaaaagcccttataatggtgtaagaaaagacagcaagagaagcagaaacagcagaagtgccagtagatcaaggtcaagaaccaggtcacgctctagatcacacaccccaagaagacattataataataggcgaagtcgatctggaacatacagctcaagatcaagaagcaggtctcgcagtcacagtgaaagtcctcgaagacatcataatcatggttctcctcaccttaaggccaaacataccagagaagatttaaaaagctcaaatagacatggtcataaaaggaaaaaatctcggtctcgatctcagagcaagactcgggatcactcagatgttaccaagaaacacaggcatgaaagggggcatcacagagacaggcgtgaaagatctcgctcctttgagaggtcccataaaggcaagcaccacggtggaagtcgctcaggacatggcaggcataggcgctgactttcatcctctgacactgcatcggtccctggtgttgcccatatgcagtgtgacgatgtatggactcaatcaaaacatgaaaagcaaactgattagggattgatttattaaaattgtctaggtttctagaaacactgaggacattttcttttgaaaagaactatgttaaggttttttgcacattaaaatgccctagcagtatctaattgaaaaccatggtcaggttcaattgtactttattatagttgtgtattgtttattgctataagaactggagcgtaaattctgtaaaaatgtatcttatttttatacagataaaacttgcagacactgttctatttaagtggttatttgtttaaatgatggtgaatactttcttaacactggtttgtccgcatgtgtaaagatttttacaaggaaataaaatacaaatcttgtttttctaaaaaaaaaaa

SEQ ID NO: 81 - DNA, 3044 bp, Rattus norvegicus
tgcactccagccatccagccatggctccctcacagctcgcgtggctgctgcgcctggccgcgttctttcatctgtgtactctgctggcgggtcagcacctcggcatgacgaaatgcaacatcacgtgccacaagatgacctcgccaatcccagtgaccttgctcatccactatcaactgaaccaggagtcctgcggcaagcgcgccatcatcctggagacgagacagcacagacacttctgtgctgacccaaaggagaaatgggtccaagacgccatgaagcacctggaccaccagaccgctgccctgactagaaatggtggcaagtttgagaagcgtgtggacaatgtgacacctaggatcacctcggccaccaggggactgtccccaactgccctggcaaagcctgagtcagccacagtggaagaccttactttggaaccgactgctatttcccaggaggcccgaaggcccatggggacttcccaagagccaccagcagcagtgactggatcgtctccctcaacttccaaagctcaggatgcagggcttgccgccaagcctcagagcactggaatttctgaggtggctgctgtctctaccaccatttggccgagttctgctgtctaccaatctggatctagcctctgggccgaggaaaaagctactgaatccccccccactatagccctatctactcaagcgtccaccacttcaagccccaagcagaatgttgggtctgaaggccagcccccatgggtccaggagcaggactccactccagagaaatctccagggcctgaggagacaaacccagttcatactgatattttccaagacagaggacctggcagcacagtccatccctcagtggctcccacctcctctgaaaagacccccagcccggagctggtggcctcgggcagccaggctcctaaggtagaggaacccattcatgccactgcagatccccagaaactgagtgtgtttatcactcctgtccctgactcccaggcagccacccggaggcaggcagtggggttactggcctttcttggtctactcttctgtctgggggtggccatgtttgcctaccagagcctccagggctgtccccgcaaaatggcaggggagatggtggaaggcctccgctacgtcccccgtagctgtggcagtaactcgtacgtcctggtgccggtgtgagctgcctgcttgcctgcctgtgtccagagtgtgattcagacagctgtctggggacccccatcctcatacccaccttcatccacgctgggagaatgggaatgcagaagctagatcctccaggggccatgtgctccaacccccgaggagtggccctggaggccaccctagaccattattcacttatcagagacagacagagcaggtggccttccagctcccccatatttgaaagaatcctctgctgctggctggttagaggggcccttgacatcccaaactctatgagcaattatttattggattcccagccccctgagacacccgtttccccgtgcgcaccgtggtccacccatcttacaagcagcagccaggcctctctgcctgtcccctgacctcctcgtgtctcctggctttgctgcagtcgccagccctgtctcctccccggccagctgcggtgctatctatcccggtctctctctctcgtgtacagagccatcaccaccatcaccaccaacaactcgttctgtctttgcttgcatgaggttaatgctgtgttttctggagctctctgggacgggagatgagcttctgtgagggtttaaagtgttcctccccagactttgatgtgccgtgaagcatgctgcctctgaaggaaggctctggtccccactccgctgccagcacaacaaagtgccccacctgtaaaggaaaagagactcggcccagagctggcaaaaacccatggccctgacatcatcactttctctgagatctttgtccccatccctggatgccaccccccccccccagcccttatcaacatgaatagtcactgccattccactggactgacacttttgtatgctgtgattctgagggctggcaagggatgacttgagagtgcagatcctacccatgggcccccaaatggaggctgagctggggacctgcaggaagagaggccaactcagaaggctccgctgtgttctcactggcacccctcccctgtgcaccaaggtgacagtcacaggtctgccctgcctgaagaacaagccacagaaggaagattatgacaagtccctgggaggccaaggatccagggcaaaccctggagtggccacacacccaatttcagcttagggacttgtgcatgtgtgtacttgcacagcccagatcattcagaagctgccaggatcctttcctacatctgagagcgcagttcctgccaaggtctcaccttcgcctcacttcaggcagggcagaactcccataacattctccaagagccctgtgacgtgttctggaagggactctgccctgggcacaaagtgtctactgaagcagagagcagcgccccagccccagccccagcgccccagcgggagctgtaccggcagaccacgccctgggggggagggccctccgtggcagctttccgctctgaatagctccaaccgtcacctttggagcctcccaggggcgggcttcacccagccagtgactcactccttgataggtggaagctcagaacaggtggtctcgtcccagagtgaggaagccagccccttggcgaccctcctcttgggaagcttgtgggaggctctggtctggctccagagtactagttgtaggcctgaggagcagcagcccgagtgcactatatcctggttcttcggtggggagccttcaagggttgggacacccatggttggactttgttggttcccgcgcctcgtgggccaaaacaatctgaggaggactttggaaggagttggtttttcaagcatcattaccaatgtctgtgccattttgtattttactaataaaattttaaagtcttgt

SEQ ID NO: 82 - DNA, 3059 bp, Rattus norvegicus
ccgcgtcgacccggcacaaacacaccatgcaccctgacagtaaatttataaaaaatttttttcaactatagcacaaaaaatgtgtatcacttaacagggatgacaaatggctgtcacttcagtcactataatgcacaatatatatatgccttctacttatgaagcacgtttactggaaaacaactgttatgcagacggcatcctcatttttcttatgtttggtctcttgtcccttgagagatcatgtccagtaagggatctacaacagttccttgtgtgtgttaacaatgatgaaatcacaattgatgtgttttcctgagtctgtccccacagttaaacaatgcctttctccccggggcgccgcgcccggccggcgcctccgcttccagccaagatggcggagagcggcgaggctctgggtacggtcccggagcacgagcggatcttgcaggagatcgaaagcacggacaccgcctgcgtagggcccacccttcggtctgtgtatgatggtcagccaaatgcacacaagaagttcatggaaaagctagatgcctgcatccgcaaccatgacaaggagattgagaaaatgtgtaacttccatcaccagggctttgtagatgctatcacagagctcctcaaagtaagggcggacgcagaaaagctgaaggtccaggttactgataccaaccgaaggttccaagatgctggaaaagaggtgatagaacaaacagaagatattattcggtgtagaattcagcagagaaatattacaaccgtagtagagaaattgcagttatgcctgccagtgttggagatgtacagtaaactgaaggaacagatgagcatgcagaggtattattctgcacttaaaacaatggaacagttagagaacgtatactttcctcgggttagccagtaccgcttctgtcagctcatgatggacacacttcctaaactccgggaggatatcaaagacatctccatgtctgacctcaaggactttctggaaagcattcgaaagcattctgacaaaataggggaaacagccatgaaacaggcacaacagcagaagagcttcagtattgctgtacagaagcaaaccaatatgaggtttgggaaaaatatgcatgtaaacaatgacaggactctagaggaaaagagtgacatcatactgaagcacacacttgaggaggaggccgagaatgacgaggaggtcttaactgttcaagatctcgttgacttttcccctgtttaccgatgctcacacatttattctgctttgggtgatgaagaaacatttgaaaattattaccggaagcaaaggaagaagcaggcgcgcctggttctgcagccgcagtcgagtgtgcatgaaacagttgatggctatagaagatatttcactcagattgtagggttctttgttgtggaagatcacattttacatgtgacccaaggattagtaaccagggcatacactgatgaactctggaacatggccctctcaaagataattgctgtcctcagagctcactcatcttactgcactgatcctgaccttgttctggagctgaagaatctcatcgtcatttttgcggatactttgcagggttatggcttttctgtcaaccgactctttgaccttctatttgaaataagagatcaatacaacgaaacactgcttaagaaatgggccggtattttcagggacatttttgaagaagataactacagccctattcctattggcagtgaagaagaatataaaatggtcatcagtaaattccccttccaagatccggaccttgaaaagcaatccttcccaaagaagtttcccatgtcccagtcagtgcctcttatttatattcaagttaaagaatttatttatgccagtcttaaattctcagagtcactacaccgaagctctacagaaatagacgatatgcttaggaagtcaacaaatctgctgctgaccaggattctgagtagctgcttactgaacctcattagaaaacctcacataggtttgacagagctggtgcaaattatcataaacacaacacacctggagcaggcttgcaaatacctggaggactttataactaacattacaaatatttctcaagaaaccgttcacaccacaagactttatggactttctacttttaaggatgcacgacatgcagcggaaggagaaatatataccaaactcaatcagaagattgatgagtttgtccagctggccgactacgactggaccatggctgagtcggatgggagagcaagtggttatttaatggatcttattaattttttgagaagcatctttcaagtatttacccacttgcctgggaaagttgcccagacagcttgcatgtcagcctgccaacatctgtccacatccttgatgcagatgctcctggacagcgagttaaagcagatcagcatgggggccgtacagcagtttaacctagacgtcatacagtgcgaattgtttgccagctctgagcctgtgccaggattccaaggggacaccctgcagctggccttcattgacctcagacagctccttgacttgtttatggtttgggactggtctacttacctggctgactatgggcagccagcttccaagtacctccgggtgaacccacacgccgcccttacgcttttggagaagatgaaggacaccagtaagaagaataacatatttgcccagttccggaagaacgaccgggacagacagaagctgatcgagacagtggtgaaacagctcagaggcttggtgaccggtatgtcccagcacatgtagaccagatccatgcccgagtgcttctctgtggccagcaccggtcatgagacaataatttgtttacagaagccaaaaactgtagtagaggaaagatactaatgagggcttaaacaataaggacagcaaacatcatttgtatggacttttaataactgaatactattttatatataaaaatgtaacattaattttttccaattttagaagaaaagtcaaaagtgtaatatataaacccaataaattgtgtatg

SEQ ID NO: 83 - DNA, 2498 bp, Rattus norvegicus
ggcacgaggcgcaatgcagcgctcggccccggcgcaggcgtttgggtgttgctcccgccccgcttcctctaccgcttctccaccgggctcgggtggggccgggaggcggcgagtgacagccactgcgggccacgggagcagggcgggtggcagccatgtcggacagcggggcgagccgcctgcggaggcagctggagtcggggggcttcgaggcgcggctgtacgtgaagcaactgtcgcagcagtcggacggcgaccgcgacctgcaggagcaccgacagcgggtgcaggcgctggcggaggagacggcgcagaacctgaagcgcaacgtctaccagaactaccggcagttcatcgagacggcgcgcgagatctcctacctggagagcgagatgtaccagctgagccacctgctgacggagcagaagagcagtctggagagcatcccgctggcactgctgcccgccgctgccgcgggcgcatccacgggtgaggacacggcgggcgcgggaccgcgggagcgcggggcggcccaggcgggctttcttccggggccggccggagtccctcgcgagggccccgggacgggagaggagggcaagcagcgaacgctcaccacgctgctggagaaggtggagggctgcagggacctgctggagacaccaggtcagtaccttgtgtacaacggggacctggtggaatacgaggcagaccatatggcccagctgcagcgagtgcatggcttcctcatgaacgactgtctgctggtggccacttggctaccacaacggcgaggcatgtaccgctacaacgcactctacccactggaccgcctggctgtggtcaacgtcaaagacaatccacctatgaaagacatgttcaagctgctcatgttccctgagagccgaatctttcaagcggaaaatgccaagattaaacgcgagtggctggaagtgttggaggaaaccaagagggcgctcagcgacaagaggagacgggagcaggaggaggcagccgccttgcgtgcgccaccaccggtcacttccaagggcagcaacccgtttgaggatgaggccgaggaggaactggccaccccggaggcagaggaggaaaaggttgacctttccatggagtggatccaggagttgccggaagacctggatgtttgtattgcgcagagggactttgagggtgccgtggacttgctggacaaattaaatcactatcttgaagataagcccagcccaccttctgtgaaagagctgagggccaaagtggatgaacgagtgcgacagctcaccgaggtgcttgtgtttgagctctccccggatcgctctctgagaggtggccctaaggctactcgaagggcagtgtctcaactgatccgtctcggccagtgcactaaggcttgtgagctgtttctgaggaacagggcggcagctgtgcatactgccatccgccagcttcgaattgagggcgccactctgctctatattcacaagctgtgccatgtcttctttaccagcctcctagagactgcacgggagtttgagacagactttgcaggcacggacagtggctgctactctgcctttgtggtctgggcaaggtctgccatgggcatgttcgtggatgctttcagcaagcaggtttttgacagcaaggagagcctgtccactgctgccgagtgtgtgaaggtagccaaggagcactgccagcagctgggagagattgggctggatctcaccttcatcatccatgccctcctggtgaaggacatccagggggccttgctcagttacaaggagattatcattgaagccaccaagcaccgaaactcggaggagatgtggcgtcggatgaacctgatgactcctgaggccctgggcaagctcaaggaggagatgagaagttgcggggtcagtaactttgagcagtatacgggggatgactgctgggtgaacctgagctacactgtggtagccttcaccaagcagaccatgggcttcctggaggaggcactgaaactgtacttcccagagctacacatggtgctcctggagagtctggtggaagtcatactggttgctgtgcagcatgtggactacagcctgcgctgtgagcaggacccagagaagaagactttcatccggcagaacgcatccttcctttacgacactgtcctcccagtggtggagaggaggtttgaggaaggtgtagggaagcctgccaagcagctgcaggaccttcggaatgcatcgagactcctgcgggtgaatcctgagagcaccacgtctgtggtctgaggctctggttcgatgctgtgtgtgcgtctgtctgtctgtctgtctgtatgtatgtatgtatgtatgtatgtctgtacacacacatgtactacagatgcattgtttgtattcacattacacaatatcaacacattcctcagacacaaacagcatataaaagtgccctcttaaaaatgcagtcaaaaaaaaaaa

SEQ ID NO: 84 - DNA, 966 bp, Rattus norvegicus
atgagtgtcaactgttctctgtggcaggagaatagtttgtctgtcaaacgctttgcatttaccaagttctctgaggtccctggagaatgcttcctcctgttcaccctcatccttctcatgttcttagtatcactaacaggaaatactctcatagcccttgctatttgtaccagtccatctctacacacccccatgtacttctttctggccaacttgtctctcctggagattggctatacttgctctgtcatacccaagatgctgcagagccttgtgagtgaggcccgagggatctcttgggagggttgtgcctcacagatgttcttcttcatattctttggtataactgagtgctgcctattggcagccatggcctttgaccgctatatggctatatgttccccactccactatgcaacccgaatgagtcgtggagtatgtgcctatttggcaattgtctcatgggtaatgggatgcatagtaggtctgggacagaccaattttattttctccttgaacttctgtggaccctgtgagatagaccacttcttctgtgaccttccacctctcctggcacttgcctgtggtgatacatcccaaaatgaggctgccatctttgtggcagcagtgctctgcatatttagtccatttttactgatcatttcttcctatgtcagaattctcgttgcagtgctggtgatgccttcacctgaggggcgccataaagctctctctacctgttcatctcacctacttgtagtcacactcttctatggctcaacatctgccacctatttgaggcccaagtctagccactcaccaggagtggacaaactcttggccctcttctatacatcagtgacatccatgctgaatcccatcatctatagtttaaggaacaaggaagtaaagggtgcactgagaagaactctgggcctgaagaaagttctgacaatgaaaaggtaa

SEQ ID NO: 85 - DNA, 819 bp, Rattus norvegicus
atgtcctacggtcccttagacatgtatcggaatccgggccgtcggagcctccgggacttcagcagcatcatccagacgtgcagcggcaacatccagcggatcagccaagccactgctcagataaagaatttgatgagccaacttggaactaagcaggactcaagcaaactccaggaaaatttgcaacagttccagcactccacaaatcagcttgccaaggagacaaatgagttgctgaaggagttagggtccttgcccctacccttgtctgcatcagagcagcgccaacagaagcttcagaaggagcggctcatgaatgacttctcgtcggccttgaacaatttccaggttgtgcagagaaaggtatctgagaaggagaaagaaagcatcgcgagagcacgggctggatcccgtctttctgcagaagacaggcaaagagaagagcagctcgtctcatttgacagccatgaggagtggaaccagatgcagagccaggaggaagaggcggccatcactgagcaagacctggaacttattaaagagagggaaacggcgattcagcagctggaggctgacattttggatgtcaatcagatctttaaagacttagctatgatgatccacgaccaaggtgatctgattgatagcatagaagccaatgtggaaagctcagaggtgcatgtggaaagagcctctgatcagctacagagagctgcttactatcagaaaaaatctcgcaagaagatgtgtatcctcgtgcttgtcctctcagtgattgttacagtcttggtagttgttatctgggttgcttctaagtga

SEQ ID NO: 86 - DNA, 1578 bp, Rattus norvegicus
gaattccggcatgtttggtatcttcgtctatgactaggattcaaaggtttgtggggttctttgtttttagtggtctggactcggaaaggtcaagggtcagtacggagtctccgccggtgatggtgaagcaaacgatccagattttcgctagggtgaagccctcggtgcggaagcagcagcaagggatttattccatagatgaagatgagaaactagcgtctagcttggaaattgtcttaccccgggacctggcagacggattcgtaaacaataaacgagaaagctacaagtttaagtttcaaaggatttttgaccaagaggctaagcaagagatcattttcgagatcattgccaaaccagtcgctgagagtaccttggcaggttacaatggcaccatcttcgcatatgggcagacgggcagtggcaagacattcaccatcacaggcggggctgagcgctacagtgacagaggcatcatcccgaggaccctgtcgtatatctttgagcagttgcaaaaggacagcagcaagatctacaccacacacatttcttacttggaaatctacaatgaatgtggctatgacctgctggatccaagacatgaagcctccaaactagaagatctgccgaaagtgacaatattggaggaccctgatcagaacattcacctgaaaaacctgtctcttcatcaggcaacaactgaggaggaagctttgaacctgctcttcttgggggacaccaacaggatgatcgccgagactcccatgaatcaagcttcaaccagatcacactgtattttcactgtgcacttgagcagcaaggagccaggatctgccactgtccgacatgctaagcttcatctggttgatctggcagggtcagagcgtgtctcgaagactggagttggaggcctgcttctgacagaagccaaatacatcaacttgtccctacactacctggagcaggtcatcattgccctttcggaaaaacaccgtacacatatcccttacaggaactccatgatgaccagcgtgctcagagacagcctgggagggaactgcatgaccactatgattgcaactctgtctttagagaagaggaacatcgatgagtctatctccacctgcagatttgctcagcgcgtggccctaatcaaaaatgaagccatcctcaatgaagagattgatcccagactgatgatcgtccgcctacagaaggagattgcagacctgaaggcagagctggccatggtcacaggcgagcagaggacagaggccctcacagaagcggagctccttcagttggaaaaactaatagcatcctttgtggaggaccaagatccagagagtagactggaagttggcgctgatctgcgtaaaatccattactgttttcatcattttaagaagctgttgaatgacaagaagaccctggagaacactgacctctctgaaagcacaacacagcaagcgtgccaagagccagtgaaggatgaagaatacacaaagctcagaagtcttctcaagcagagggacaatgagatcaatatcctggtcaatatgttaaaaaaaaaaaaaa

SEQ ID NO: 87 - DNA, 4120 bp, Rattus norvegicus
aaggttgcgcaacggctcttcccagcaaccgaagttttgtttggtcccacggggggccccctctttcagctcggtggctctaggccgtcactacggagacctcgttcctttcattgatgggagcgaacaccaacgtgcacacacgccgccggakcgcccagccccgtggctgtgccgcggaggcttggtggccctgtcaccggcgtcgcggggcggcgggtttggagggtgtcaactctggggacgtgcgtgcgtgtgattgttggggaggagaaatgtgatccgcggcttcgcgtccccagcggcggcgggaggaaggcgtggcggccgcgcggcggggctgttgccggcttctctcgttacggcggcggcggccctcttcccttcgcgctgggggagatcagcggaaaggactcgggaccagaatgtctgttttcctgtctgaggggagacggctgttgtaaaatggtatggcctcacaagtcttggtctacccaccatatgtttatcaaactcagtcaagtgccttttgtagtgtgaagaaactgaaagtagagcccagcggttgtgttttccaggaaagagcctgccctcagatccatgtgaatggtagacactttggaaatcctcttccttccacgaagggtagtgctttccagacaaagataccattctctaaacctcgaggacacagcttttcactgcaggcaggggccattgttgtcaaagacactgccggtgctacaaaggtcatagcagctcaggcgcagcaggctggagtggaggcacctcgggccgtggtgtggagaaacaggctacatttcctaggaggtccccagcgatgcgggttaaagcgcaagagtgaggagttggataatcacagcggcgcgatgcagattgtcgatgaactgtccatacttcctgcaatgttgcaaaccaacatgggaaacccagtgacagttgtgacagcgaccacaggatcgaaacagaactgtaccagtggggaaggtgactatcagttagtgcagcacgaagtcttgtgctctgtgaaaaacacatatgaagtcctggattttcttggtcgtggcactttcggccaggttgttaaatgctggaagagagggacaaatgaaattgtagccattaaaattttgaagaatcacccttcgtatgcacgtcaagggcagatagaagtgagcatcttagcaaggctcagtactgagaacgctgatgagtataactttgtgcgagcctatgagtgcttccagcaccgcaaccatacctgcctggtctttgagatgctggagcagaacctgtatgacttcctgaaacagaataaattcagtcccttgcccctaaaggtgatccggcccgttcttcagcaagtggccactgcactgaagaaattaaaaagtcttggtttaattcatgctgaccttaaaccagagaatattatgttggtggatcctgttcgacagccatacagggttaaagtgatagactttggatcggccagtcatgtatcaaagactgtttgctcaacgtatctacaatctcggtactatagagctccagagattatattggggttgccgttttgtgaagccatagacatgtggtcactgggatgcgtgattgcagagttattccttggatggccactctacccgggagccttggagtatgaccagattcgatacatttctcagactcaaggtttaccaggagaacaattgttgaatgtgggtacaaaatccacaagatttttttgcagagaaacagatatgtctcattctggttggaggttaaagacactggaagagcatgaagcagagacaggaatgaagtctaaagaggccagaaagtacatattcaacagtctggacgatatagtgcatgtgaacacagtgatggacttggaaggaagtgatctcttggctgagaaagctgatagaagagaatttgttagtctgttgaagaaaatgttgctgattgatgcagatttaagaattactccgatcgagactctgaaccacccattcgttagtatgaagcacctactagattttcctcacagcagccatgtaaagtcctgttttcatatcatggatatttgtaagtctccgagttcatgtgaaacaaacaaccacagtaaaatgtcactcttacgaccagttgcatccaatggcactgctgctctagcggcaaactttactaaagtcggaacattaagaagtcaggcgttgaccacatctgctcactcggtcgtgcaccatggtatacctctgcaggcggggaccgcacagttcggttgtggtgatgcttttcatcagaccctgattatctgtcccccagctattcaaggtattcccgcagcacatggtaagcccaccagttattccataagggtggacaacacagttccgcttgtgactcaggccccagctgtacagcctctgcagatccgaccaggagtcctttcacagacatggtctggtcgaacacagcagatgctaatacctgcctggcagcaggtaacacccatggctcctgctgctgcaacactaacttctgaaggcatggctggttcacagaggcttggagactgggggaaaatgattccacacagcaatcattataactccgtgatgccgccacctcttctgaccaaccagataacattgtcggcccctcagcctatcagcgtaggcatcgcacatgttgtctggcctcagcctgccactaccaagaaaaataagctgtgccagaacaggagtaattcattgcagaacaccaatgtcccacattcagcatttatttctccaaagataatcagtgggaaagaagttgaggaagtaagttgtgtagaaacacaggacaatcatacctcagaaggagaggcaagaacttgccatgaagcgtctgtcagacaggattcttcagtttcagacaaacagcggcaaaccatcatcattgccgactccccaagtcctgccgtgagtgtgatcaccattagcagtgacactgatgacgaagagacctcacccagaccttcactccgagagtgtaaaggtagtctggattgtgaagcttgccaaagcactttgaatattgatcggatgtgttcactcagcagtcccgacagcactctgagtaccagctcctcagggcagtccagcccatccccttgcaaaagaccgaacagtatgtcagatgatgaacaggaaagtgggtgtgagactgtggacggctctccaacgtcagactcctcggggcatgacagtccatttgcagagagcagttttgtggaagacactcctcaaaacccagagctggggacttgtgctggcacagaggccaagccagctcttagcactgctgtggagccaccagtggggacagagcgtggcctgaacgtcgatgcgcacatggccaacacagattctacatgccagccattgacaaaaggccagcccgcccctggaaagctgaaccagccctctgcctcggctgctcgtcagcaaaagcccacatcagcattccagcagcagcatttgaacctgagccaggttcagcatttcggaactgggcatcaagaatggaatggaaactttgggcatcgaagacagcaagcatatattcctactagtgttaccagtaatccattcactctttctcacggaagtcccaaccacacagcagtgcatgcccatctggctggaagtgcgcacctcggaggacagcccactctgcttccgtacccgccatcaactgccctcagtagtgctgcacccgtggcccacctcctagcctctccgtgtacctcaagacctatgttacagcatccaacttataatatctcccatcccagtggcatagttcaccaagtccccgtgggcataaatccccgcctgttaccatccccgaccattcatcagactcagtacaaaccaatcttccctccacattcttacattgcagcatcgcctgcatatactggatttccattgagtccaacaaaactcagccagtatccatatatgtgaaaactcgaaagcagtttattgaggaagctcaatgatacaaacgtttgattaaaaataaaaacatggtatggaat

SEQ ID NO: 88 - DNA, 2919 bp, Rattus norvegicus
ggcacgagccgggtcgtgcgcgccgagctcgggatccggctcccagtctagccccgcttcgggccgtgcgccctttgctcggcgtccggctccggggctccgcgccacccgctcccgcctgcccggccgcctggccgcctccccgtagtcagagcgcggccaccgagctgctcgcgccagccgcatccgcgccgcccctgccgatcggccctccggaggcaccgctccgggtcccccccgccactgcctggcacccaggctgcccacctcgcgacccgggtcctcgctgccgcctcgcccggccccactgttctctccacggggtctcgccagctctttctcgtcgccgccaccgccgcccccttggagcagcgggtccgccgcgggtcaccatgcccagcaaaaccaagtacaaccttgtggacgatgggcacgacttacggatccctttgcacaacgaggacgccttccagcacggcatctcttttgaggccaagtacgtgggaagcctggatgtgcccagacccaacagcagggttgagatcgtggctgccatgcgcagaatccggtatgagtttaaagccaagaatatcaagaagaagaaagtaagcatcatggtctccgtggacggtgtcaaagtgattctgaagaagaagaaaaagaaaaaggagtggacgtgggatgagagcaagatgctggtgatgcaggaccctatctacaggatcttctatgtctctcatgactcccaagacttgaaaatcttcagctatatcgctcgagatggtgccagcaatatcttcagatgcaatgtctttaaatccaagaagaagagccaagctatgagaatcgtacggacagtgggacaggcctttgaggtctgccacaagctgagcctgcagcacacacagcagaatgcagatggccaggaagatggagagagcgagaggaacagcgatggctcaggagacccaggccgccagctcactggagctgagagggtctccacagccaccgcagaggagaccgacattgacgctgtggaggtcccactccccgggaatgacattctagaattcagccgaggtgtgactgacctggatgctattgggaaggacggaggctcccacatagacacgacggtctcaccccatccacaggagcccatgctggcagcctcccctcgcatgctgctcccttcttcttcttcctcgaagccaccgggcttgggcactgggacgcccctgtccactcaccaccagatgcagctcctccagcagctcctccagcagcagcagcagcagacacaagtggctgtggctcaggttcacttgctgaaggatcagttggctgctgaggctgcggcacggctggaggcccaggcacgagtgcaccagctcctgctacagaacaaagacatgcttcagcacatctctctgctggttaagcaggtgcaggagctggaactgaagctgtcaggacagagcaccatgggctcccaggacagcttgctggagatcaccttccgttcaggtgccctgcctgtgctctgtgaatccaccactcctaagccagaggacctacactcaccactgctgggcgctggcttggctgactttgcccacccagtgggcagccccttaggtaggcgtgactgcttggtgaagctggagtgctttcgtttcctcccagccgaggataaccagccgatggcacagggtgagccgctcctaggtggcctggagctcatcaagttccgagagtcaggcatcgcctcagagtatgagtccaacacagacgaaagcgaggagcgtgactcgtggtcgcaggaagagctgccacgcctgctcaatgtcctacagcggcaggagttgggtgacagtttggatgatgagatcgccgtgtaggtgcagggcaaggagctggtgaaggtggcagcatgatgccaagggggtcaagtctgcctgtccccggctggggaagcccaggggaaagcaccgctgagaaaaacacccagggctgagagtgtagggtttcagaagagggttgggattttgctttggaaggtaaagcagggaagaaaatggattcctagacacaggaatcagcacctgtattctgctaatgactgaatgggacggaagcagggctttccagaacccaggaccttgggatgggtccgccttcaagaatcacagttctggaaggcctgttgctcccaccgttatagtcaggttctactcaatctgtccgtgatgtctcagtggcctacactctcctgtctctgtggtgcagatcataaatggaagccattgataccgtctcacgtactttgttttggatatcaggatgctacaagttgcctaaccctcccttaagctgtaggagaattccttccccaggccctggctgagatcagagaggttggaggatttccctcactgctgggaaattgagactctgccattcagtgagcatggaggtgacagcagtcacaagtcacagtgaataaactaggaatttactctaagtggggtgttggatgttgcttctgaggaagctaggagtatgaataggattgaggaccctgcagggagagcctggggagggttagcctaggggagggttagcctagagaagggttagcctaggagtgctgatgacagttgtggcagctcatgtaggtgtgattcttcagtttggaaaccatgccccttacccatctcctgcctgcaacccagctcatataaacgaggctaagaactatcataatatccccttttcttgcctcaggggctgtgcctgcctaagctttgacagtactatgcctttgtgtaagtctcagagacccagaaccccctgccttacctctctctacctgtcccctccactgggcagtagtggtcagtttttactcgtgcc

SEQ ID NO: 89 - DNA, 2381 bp, Rattus norvegicus
gcgaatggcagcctccagaaagccgccgcgagtaagaccacaggatggctccgaaggtgacctcagagcttctgcggcagctgcgacaagctatgaggaactcggagtgcgtggcagaacccatccaggcctacatcatcccatcgggagacgcccaccagagtgagtacattgcaccctgtgactgtcggagggcgttcgtctccggcttcgatggctctgcaggcacagctatcatcacggaggagcatgcggccatgtggacggatgggcgctactttctccaagctgccaagcagatggacaacaactggaccctcatgaagatgggtctgaaggacacaccgactcaggaggactggctggtgagtgtgcttccggaaggatccagggttggtgtggaccctctcatcattcccacagattactggaagaagatggccaaggtacttcgaagtgctggtcaccacctcgtgcctgtgaaggagaaccttgtggataagatctggacagaccggccagagcgcccttgcaagcccctcctcacactgggtctggattatacaggcatctcgtggaaggagaaggttgcagaccttcggttgaaaatggcggagaggagcatcgtgtggtttgtggtcactgccctagacgagattgcatggctgttcaatctccgagggtcagatgtggagcacaacccggtgtttttctcctacgcaatcataggactagagaggatcatgctcttcatcgacggggaccgcattgatgcgcctggtgtgaaacagcacctgctccttgacttgggcctggaggcagaatataaaatccaggtgctgccttacaagtccatcctgagtgaactcaagaccctgtgtgctgacctgtccccgagggagaaggtgtgggtcagtgacaaagccagctatgctgtgagcgaggccatccccaaggatcatcggtgctgtatgccttatacgcccatctgcattgccaaagccgtgaagaactccgccgagtcagcaggcatgaggcgggctcatattaaagatgccgttgccctctgcgagctcttcaactggctggagcaagaggtccccaaaggtggcgtaacggagatctctgcagctgacaaggctgaggaatttcgaagacaacaggctgactttgtggacctgagcttcccaacgatttccagcacgggacccaacggcgccatcattcactacgcgccgatccctgagacgaataggaccctgtccctggatgaggtgtatctcattgactccggtgctcagtacaaggatggaactacagacgttacccggaccatgcacttcgggacccctactgcctatgagaaggagtgtttcacgtatgtactgaaaggccacattgctgtgagcgcggctgttttcccaacgggaaccaaaggccaccttctagactcctttgcccggtcagccctgtgggattccggcctggattacctgcacggaacaggacacggcgtcgggtctttcctgaatgttcacgagggcccttgtggcatcagttataaaacgttctctgacgagcccttggaagccggcatgatcgtcactgatgagccagggtattatgaagatggggcgtttgggatccgcatcgagaacgttgttttggtggtccctgcgaagaccaagtataatttcaataaccgaggaagcctgacctttgaacctctaactttggttcccatccagaccaaaatgatagatgtggatgctcttacagataaagagtgtgactggctcaacagctaccaccagacctgcagggatgtgattgggaaggagctgcagactcaaggccgccaggaagctctcgagtggctcctcagagagacagagcccatctccaggcagcattgataccgtctagcgtttgtttttgtaggatgctctggggaaggaagacacatggcagaccctgacttctttctcctcacctcctcctcctccccaactcccctttttacttttagacactaagaagggcagaaactcttcttatccactttgatattttcttgcaaacagtcttttatgaatttttaattgttgagaatgagccaggaataaaactgctacaccagaaggaggggcctcacaaagcgaagccttgacaagggggagatacccgagccctctggccagcggtggccagcggtgactgctctgcgatggtctccttccaggtgctggtacctcagtcgcggtcaccctgacgttcatgagaccctcctatgatcagtgaataaaatactaaactcggaagagatgagtgcctatggtgtgtacagataaccctctgattttgtgggtttctgagcggcc

SEQ ID NO: 90 - DNA, 1108 bp, Rattus norvegicus
ttgcttttaataacactgaaccccatcagagccagaagcaggtgcccgctgcagtttttgacacatgccactttccctacagctggaggccttgggttccatttacagtactggggtggggggataaggcctagtaaaaccctctcctcaaagatgcccttgagggtcggcggcgacggcgacatggagagcggggcctatggcgcggccaacgcgggcggctccttcgacctgcggcgctatgtgtcccagcctcaggtggtgacacgcctcgtgagcatggtcttggccttgatcgtattctcctgcatcttcggcgagggctacatcaaccttcactcatctgaccagctacactgtgtgttcaaccggaacgaagatgcctgccgctacggcagtgccattggggtgctggccttcctggcctcagccttcttccttgtggtggatgcgtttttctctcagataagcaatgccactgaccgcaagtatctggtcattggtgacctgctcttctcagctctctggaccttcctgtggtttgtcggtttctgctttctgaccaaccagtgggcagccaccaaacctgatgacgtgttggtgggagcagactcagcccgggctgccatcaccttcagtttcttctccatcttctcctggggtgtgctggcctccctggcctaccagcgttacaaggctggagtggatgccttcattcagaactatgtggaccccacgccggatcccaccacagcctacgcctcctaccctagtgcctcggtggaaaactaccagcagccgcccttcacccagaatgtggagactactgagggctaccagcctcccccagtgtactgagcagccagggacaaagaggcaggagggtgcttggtggggctgcccctccaccctggacttctctcaaggtttgctgtccagaactgtagtcccttggctgttacagttgacagcccgagtccatgcctttctgcaccccagcagccagagcacacctgaagtgcccatgcccagaggggcttcaccgccacccgcctgaccctcaagggcatctttgaggagagggttttactaggccttatccccccac

SEQ ID NO: 91 - DNA, 719 bp, Rattus norvegicus
ttgcttatagagcgatacccgggatctcctggaagctatgctgctcgccagcacataatgcagagaattcagagacttcaagccgactgggtcttggaaatagacaccttcttgagtcagacaccctatggataccggtctttctcaagcatcatcagcaccctcaatcccactgctaaacgacacttggtcctcgcctgtcactacgactccaagtattttcacccttgggacaacagggtgtttgtgggagccactgattcagccgtgccatgtgcaatgttgttggaacttgcgccgtccttagacaagcaactcctttccttggagaaaattccagactccaagccagatccctcactccagctaattttctttgatggggaagaggctcttcttcattggtctcttcgtgattctctgtatggatctcggcacttagctcccaagatggcatcaaccccacacccacctggagcgaaagacaccaaccaactgcacggcatggatttattggtcttgttggatttaattggagcgcccaacccaacatttcccaaattttttccaaaatctgccagatggtttaatagacttgaagcgattgaacaagaactccacaaattaggtttactcaaggatcactctttggagaggtgctatttccagaatcatagttatggaggggcgattcaggatgaccatattccatttttaag

SEQ ID NO: 92 - DNA, 4131 bp, Rattus norvegicus
ctcggagaaagacaggccggccatcaggaaaacaaacaagcctcagcaacatctaaacccttgaaaggatcctgagagaggggggaaagggaaaacagcagccaccagcccaaccacttgtgtcttctgcccctccccacctatcttgcccaccccaccagcccacgctgcttgggacttgaaatctgtggccgaaggaccgtcaccacataacttcaaaaataatcaaccaccctccctacccaaacccacccaatctcactcatccagcatttcctttttggagtccactcagaatttttttcaacgaccccctctccctaatggagttgggtggggggaaaatgaaaactgagttggtctttacttttttaagagactttttgatccaatgaggccccacaagtaactgagtttgggtcctggttggttgttttattttttttcctccaaaattttacccctcccccctgagcccgaggtgctgacgtcgcaaaaaaattggataaagccaccatcatgggttcaggacccatagaccccaaagaacttctcaagggcctagatagcttccttactcgggatggagaagtgaagagtgtggatggaattgccaagatcttcagtctaatgaaggaggcacgaaagatggtgagtcgatgcacgtacttgaatattatcctgcagacccgggcgccggaggtgctagtcaagtttattgacgtcggcggctacaagcttctgaacagttggttaacgtattcaaagacgaccaacaacattcctctcctacagcagattctgctgactctgcagcacctcccactgactgtggaccacctcaagcagaacaacacagcgaagctagtgaagcagctcagcaagtcaagcgaggacgaagagctccggaaattggcatcagtccttgtcagtgactggatggctgtcatccgctcccagagtagcacccagcctgcagagaaagataagaagaaaaggaaggaagaggggaaaagtcgaaccacgcttcctgagcggcctttgactgaagtgaaggctgaaacccgggctgaggaagccccagagaagaagaaggagaagcccaagtcacttagaactacggcacccagtcatgccaagttccgttctactggactggagctggacaccccatctttggtgcctgtgaagaagaactccagcactgtggttgtgtcagacaagtacaacctgaagcccatccccctcaagcggcagagtgccacagctgctccaggcgatgctgccccgcctgcagagaagaagtacaagcccctcaacacaacccccaataccaccaaagaaattaaagtgaagatcatccccccacagcccatggagggcctcggttttctggatgctctcaattccgcccctgtcccaggcatcaaaattaagaagaagaagaaggttctatcacctactgctgccaagcccagcccttttgaagggaaaacaagcactgagccaagcacagccaaaccttcctccccagagcctgcagcccccgctgagcccatggacacagaccgtcctggcacccctgtccccgctgtggaagtcccggagctcatggatgcagcctcttcggagccaggagctctggatgcaaagcctgtggaaagccctggagatcccaaccagctgactcgaaagggcagaaagagaaaaactgtgacgtggcctgaggagggcaagctgagggagtatttctacttcgaactggatgaaactgagcgagtgaatgtgaacaagatcaaggactttggggaggctgctaagcgtgagatactgtcggaccgacatgcttttgagacagcccggcgactaagccatgacaatatggaggagaaagtgccctgggtatgtcccaggcctctggttctgccctcacctcttgtcatccctggaagcaacagccaggagcgatacatccaggctgagcgggagaagggcatccttcaggagctcttcctgaacaaggagagtcctcacgagcctgatcctgagccgtatgaacccattcctcccaaactcatccccttggatgaggagtgcgccatggatgagactccgtatgttgagaccctggagcctggagggtctggtggctcacctgatggagcaggaggctccaagctgcctccagttctggccaatcttatggggagcatgggagcagggaagagcccccagggccctggaggcggtggcatcaatgttcaggagatcctcacttccataatgggcagtccaaacaaccacccttcagaggagctgctgaaacagccagactactcagacaagctgaagcagatgctggtgccacatgggctcctaggtcctggtcctgtagccaatggcttcccaccaggaggccctgggggccccaagggtatgcagcatttcccccctggtcctggagggcccatgccaggtccccatggaggccctggtggaccagtgggtccacgtctcctgggtcccccaccaccttctcggggaggtgatccattctgggatggcccaggtgaccccatgcgaggtggcccaatgcgtgggggtccaggacctggtcctggaccataccacagaggccgagggggtcgtggaggaaatgaaccgccaccaccccctccattccgaggagccagaggaggtcgttctggaggaggccccccaaatggccgagggggtcctggtggaggtggcatggttggaggtggtgggcaccgcccccatgaaggccctggagggagcatgggcagtggacatcggtctcatgagggccctggagggagcatgggcagtggacatcggtctcatgaaggccctggacacgggggaccccatggccaccggccacatgacgtccctagccatcgaggccacgaccatcgagggccaccacctcatgaacaccgcggtcatgatggccatgggggaggcggccaccgagggcatgatggaggccacagtcacggaggagacatgtcaaaccgccctgtctgccgacacttcatgatgaagggcaactgccgctatgagaacaactgtgccttctaccacccaggggtcaacgggcccccactgccctaggcctgcctgccctacccgcacccctgtggactgcagctttgctccttccacttggttatggcttctgtgaggcccactttccttttccccagctgatgaggagccggccccctcagttcccacctggttgggtttctgggggtttctgattcctggtgtgcattgatgtacatattccctccagtctggagcggagaggagagagactggactgctgagacggctggcttcactttgtgaggagatttgccctgtgccccaaaccccttccagtattagccccgatgcctgagaacctgaagccggccaccctggagacctctgctctccacatgcacacggaactgagttggtcagctgcacttaggaaaccgtccaagctaagctcattatcttcacagggtgagggggtggtgaggggtaccatatatcccactgcactgagggctcaagctggctgaagctgagttctggaactaccccccacttgtgccccacatgggccagtcactgttgagtcctttctcaagaaggactgcaactgttacttcccaggtcatcgtgggtctgctaggttcagtgatggcacattcatatctgtgtccagtggaagttgtatctggcagaggggtggcctgtagtgttgggccactcttgcctacagccattttcgagactccgtgaggccagctttcattaactttagccgggtataccgggcctgacgcactacatgcactgcctttgggagtgggctggctccttaccccgtaaggagccctgtcagtgaggcttcctgggtagactcagcaggaggggcccttcccagtcctctcctccccctgtcttggcatcagttgttttctatgaaaacagtgggttggttttgtgcagggtcttgggttagaaccaatggatttgaggagttttttcttttggttttgtatattttgtacattaataataaacagtggaaagagaagcagctcattt

SEQ ID NO: 93 - DNA, 3344 bp, Rattus norvegicus
  misc_feature (1)..(3344): n = a or c or g or t
gcattatggagtagttattcatngcaccccggcttaaaatttangttccggntngtatgtggggggaattggagcggataacaattcacacnggaaacagttagaccatgattangatttctaacaccttggctttttaaggcaaccatgttgactgataagtataaacaagntaaattacatgcatataaatttatttgtaatacaatgaagagagacaagatgtatccccaaatagagattttttaacgcatttctacaatataatgcattgtggattgcttcatattgaccaggacatcgtcaatacgatcatcaagcactgctcacctcagtttttttcacttggtttgcctggggccacaatgcttattatggattttattatagcggctgggagagtggcttcttcagcttttcttaatgcaccaagagtggaagcacaggttcttctgggatctttggtttgcttccccaacttatactgtgagctgcctgctctgcatccaagcacgcctgacatcgctgtgtctcagttcacagacgtcaaggaacttataattaaaactgtcttaagctcggcaagagacgaaccctctggccctgcacgatgtgtagcactttgcagtttaggtatatggatttgtgaagaattagtccacgaatctcatcatcctcaaattaaagaagcactgaatgtaatttgtgtttcattaaagtttactaataaaacagttgcccatgtagcttgtaacatgcttcacatgctggttcattatgcacctagacttcagacttaccagcctgactctcccttgaaaattattcagatcctaatagcaactatcacacaccttttgccaagtacagaagcttcatcatatgaaatggacaagaggttggttgtgtcattacttctttgccttctggactggatcatggccttacctttaaagacaatactccaatcagtccattctacaggagcagaaaatgagaagacagaaaaatctgtcctcaactgtatttataaggttttacatgggtgtgtatatggagcacaaagttttagccatccaaagtactttccaataagcctttctgatttggcatctgtagattatgacccttttatgcatttggaaagtctgagagagcctgaacctctacactctcctgattcagaacggtcttctaaactgcagccggtgacagaagtgaaaactcagatgcaacaaggattaatttctatagcagcccgtactgttattacccatctggtgaatcacctgggccattatccaatgagtggtggtcctgctatgctaacgagtcaggtgtgtgagaatcatgacaatcattatagcgaaagtactgaactttctcctgagctctttgacagtccaaatattcagttctttgtgctgaataatacaaccttagtgtcttgtatccagataagatcagaagagagtgtgcctggaggaggtttagctgctggccttgtgtcagccaactcaaatgttagaatcatagtacgtgatctctctggaaagtactcatgggattctgccatactgtatgggccacccattgtaagtggtttgcctgaacctacatctttcatactttcaatgtcttaccaagagaaaccagaagaacctcctacatctaatgaatgcttagaagacataacagtaaaagatggactttctctccagcttagaagatttagagaaactgttccaacttggtctacaataagagaagaagaagatgttcttgatgagctcctgcagtatttacgcactacaaatcctgaatgtttacagagaactggaatctccctcaatgttcctgctccacaacctgtgtgcatttctgaaaaacaggagaatgatgtcattaatgctatccttaagcaatacacagaagaaaaagagtttgtagaaaagcactttaatgacttaaacatgaaagcctcagaacaagatgaaccaacacctcagaaacctcagtcagcattttattactgcagattgcttcttagtatattgggaatgaattcctgggacaaacggaggagctttcatctcctgaagaaaaatgaaaagctgctcagagaactgaggaacttggattcaaggcagtgccgagaaacacacaagattgcagtattttacgttgctgaaggacaagaagataaatactccattctcaccaatataggaggaagccaagcatatgaagattttgttgctggccttggttgggaggtaaaccttacaaatcactgtggcttcatgggaggactgcagaagaacaaaagcactggactgaccactccatattttgctacctctacagtagaagtaatatttcatgtatctacaagaatgccttctgaatctgatgactctctgaccaaaaaattgagacatctaggaaatgatgaagtacacattgtttggtctgaacatactagagactacaggagaggaattattcctacagagtttggtgatgtcctcattgtaatatatccaatgaaaaaccacatgttcagtatccagatcatgaaaaagccagaggttcccttctttggtcccctttttgatggtgctattgtgaatggaaaagttctgcccattatggttcgatccacagcaataaatgctagccgtgctctgaaatcactgattccattgtatcaaaacttctacgaggagagagcacggtacctgcagacaattgtccagcaccacttagagccaacgacatttgaagactttgcagcccaggttttctctccagctccctaccatcatttccctgctgatgcaggtaagaataaaagagagtgttgatcacttgtcacaaacccaaaatgcaatacccttttcttctcaatcatggttgaataaaattcaggtcattgaaatatattattcatgactgagtttggcctgtaaatttcattgtttccttttatgtaaatgtggttgcttaaatatccagtaatcctcatcaaagtgcatgacccatatctaaccacagtccctggctcctgcttttcatgagaatctgaagtatctgcagaaagaactctcaacttcagaggatcaaattttatggccaaaaatacagtgtcatcatctctaantttacaagtaaagctaaaccagtctagattaaaagcatttagtacagcaaattatgttataatattcaaagactttaagaaggtactgcattaatacatttaactaattttaaggaaatcagcaataaaaatgctcatggctcgtgccgaattcctgcagcccggggggatcactaattct

SEQ ID NO: 94 - DNA, 1473 bp, Rattus norvegicus
cgcgagcaacccgcaaaacgttgtgcattgcgttgaaaaggtgcatctggttcccgattctactccccacccgcgaccgcacacagcaaacatgacccagcagccgcctgacgttgaggaggatgactgtctttctgaataccaccacctcttctgcccggaccttctccaggacaaagtggcttttatcactggtggtggttctgggattggcttccggatcgccgagattttcatgaggcatggctgccacactgtcatcgtcagcaggagtctgccgagagtgtccgaggctgctaagaagttggttgctgccactggaaagcggtgtctccctctgtctatggatgtccgagttcccccagctgtcatggctgctgtggaccaagcgctgaaagaatttggcaaaatcgacatcctcattaactgtgctgcagggaactttttatgccctgccagtgcattgtctttcaatgcctttaagactgtggtggacattgacacccttggcaccttcaatgtgtctcgtgtgctttatgagaagttcttccgggaccatggaggagtgatcgtgaacattaccgccaccctcagtatgcgggggcaggtgctgcagctccatgcaggcgctgccaaggcggctgtggatgctatgacgcgacacttggctgtggagtggggtccccagaatatccgtgtcaacagcctggctcctggtgccatcagcggcactgagggtctgcggagattaggaggccccaaggccagttcgaaatttaagtatctttcaagtcctattccaagactcggaaccaagacagaaatcgcccacagcgtgctgtacctagccagccctctggcttcctatgtctcagggattgtgttggtggttgatggtggtagctggatgacgctcccaaatgacattgggcgactgctagagtttgaatcctcctctgctaagctgtagtgtttgaagagcacacccaaggcttcaagcatgttaaagcaacagaatcaactgaactacgtcctctaccccaggataccttttttgacacataaacattgattgcgcttaagaaagttgtactgaggaggccgtgttcttcatggggaaggcttcctgtctcacataggtctatagtcacacgaggaatgttgaatctgattgggaaatccaagcccacctgcccttcctccgggatcaagctatttccaagctctgcctctcctttgcccacatcctgagtagaaatggccggattgtgagcctagcctgatacttgcttacagtatctgaagagttactatgattttaccagaaaaaaaaaatgcactttcttgtaaaaaaaaaatcatcttttttactgtaaaaatagctgagttggaatttgtaaaagtttctagaaagaaaatttaaaagattgctgactgattctgtcactgaaaaaaaaaaaaaaaaaaaaaaaa

SEQ ID NO: 95 - DNA, 1243 bp, Rattus norvegicus
attttgggcgagcccagccccgtccgtggtagcaggccatggcgatgggcagcggcggcggcgcgggctctgagcaggaagacaccgtgctgttccggcgtggcaccggccagagtgatgattctgacatttgggatgatacagcattgataaaagcttacgataaagccgtggcctcctttaagcatgctctaaagaacggtgacatgtgtgaaacttcagataagccaaaaggcacagctagaagaaaacctgctaagaagaataaaaaccaaaagaagaatgccacagctccattgaaacagtggaaagctggtgacaaatgctctgccgtttggtcggaagatggctgcgtttacccagctaccatcacgtcagttgaccttaagagagaaacctgtgtcgtggtttatactggatatggaaacaaagaggagcaaaacctatctgatctgctttccccgacctgtgaagtagctaacaatacagaacagaacactcaggagaatgaaagccaagtttccacagacgacagtgaacactcctccagatcgctcagaagtaaagcacacagcaagtccaaagctgctccatggacctcgtttctccctccacctcccccggtgcccggggcgggattaggaccaggaaagccaggtctaaggttcagtgggccaccgccgccgccacctccccctcccccgttcttgccgtgttggatgcctccgttcccttcaggaccaccaataattcctccaccccctcccatatctcccgactgtctggatgacacggatgctctgggcagtatgctaatctcttggtacatgagtggttaccacactggttactatatgggtttcagacaaaataaaaaggagggaaagaagtgctcacatacaaattaagaagttcagctctctcccaaggagatggtttgttggtgtccctggtcgataagaacagaagtctcctcgtcacctttgtggactcttggctaagtggtgtcatcatcagggtctccctgtcccgggagtccatcctgagtcagcagcagggcatgcatagagcagcagttggaggaaccgatcaatcgatcgatcagtggcagtgtgagtgcatggaagtcagccaaactgtgactgagcacaaacggacaattgcaattttcttagaatgtcaagatttgtattaatgcctttaaaattaaataaaacccttttttgaaaaaaaaaaaaaaaaa

SEQ ID NO: 96 - DNA, 1818 bp, Rattus norvegicus
cccagcctcctcgccgcaacccccgccgtagctgccgctgctcccgccgtcaccgcctccgagaacatggctgtgcctcccacatatgctgatcttggcaagtccgccagggatgtcttcaccaagggctacggctttggcttaataaaacttgatttgaaaacgaagtccgagaatggattggaatttactagctcaggttctgccaacacggagaccaccaaagtgaacggcagtctggaaaccaagtacagatggaccgagtatgggctgacgtttactgagaagtggaacacagacaacaccctgggcactgagatcaccgtggaagaccagcttgctcgtggactgaagctgacctttgattcatctttctcgcctaacactgggaaaaaaaatgctaaaatcaagacagggtacaagagggagcatatcaacctgggctgtgatgtggactttgacatcgctgggccctcaatccggggcgctctggtgcttggctatgagggttggctggctggctaccagatgaattttgagacctcgaagtcccgagtgacccagagcaactttgcagttggctacaagacggacgaattccagcttcatactaatgtgaatgatgggacggagtttggtggctccatttaccagaaggtgaacaagaagttggagactgctgtcaatctcgcctggaccgcaggaaacagtaacactcgctttggaatagcagccaagtatcaggtcgaccctgatgcctgcttttcggccaaagtgaacaactccagtctaattggcttagggtacactcagaccctaaaaccaggtatcaaactgacactgtcagccctgctggatggcaagaacgtcaatgcgggtggccacaagcttggtttaggactggaatttcaagcataaatgaatattgtacaatcgttaattttaaactattttgcagcatagctaccttcagagtttagtgtaccttttaatgtcatatgttggggatgcgagagttgattgataccacgttagacctccaggctaaggatgactcggctttaaggtgtttaccgtttcagaggtacagcggaaaccccattccaggaagggtcctttttagctgtaggcgtgggctgggaggagctcctctagagatgccaggctgcaagtggaagctgggaacgtgtggaccctttgtaaatctgtatccagttccgcacatgaaattgtgacttcctgaacatcgaaccccggtgtcccgatcctgtctgctcggaagcatgtacacacctacgtgaaagggacggttttttttttttttttatcggatggtcacgcccggttcccatcgtgccctgttcccatcctagcccatcagttacctgttttacaccaaaagtagtctttagggtgtagttagcaatttcttttgtgccattttagggtggagagggtgggcatgatgaagccagtcattcaggacttaattcttccttgtgttgtggtgtggttttcttcctttcttctgtttttttttttttaattccttttttttttgccattgcaccagagtatgaaatagcttccaggttgtccggctcagagctgggcgggtgattgtggtcacaccctgacaacactagggatctcaacggactcctcttgtagccgcaccactatttttagcagtttaatgggtacattatagagtcttccattttgtgtggaattagctcctccccttcaaatgctgtaattaacatcacttaaaataaaacttgaataaaatactgaaacctcaaaaaaaaaaaaaaa

SEQ ID NO: 97 - DNA, 519 bp, Rattus norvegicus
  misc_feature (1)..(519): n = a or c or g or t
cttcctgaccaaagaatgcttcnttcagactaaactgacaagaatttgatngcacacaggagtagatccacgtcagtagctctctgaaaagtttgttaactgtatatgatgggcttcttcaaaccactgctttgagactgtgattaagtagtctgtttacataaggttgtttctttctctcgtattagagcacgtactgatncaaagcacacttgaaactttcctgtcctggctgcctctcccactctgagccagtttaaaatggtctctctgactcttacttcacagggtccccctggtccccctggacctcctggtcctcctggtgtcagcggaggtggctatgactttggttttgaaggagacttctacagggctgaccagcctcgctcccagccttcactcagacccaaggactatgaagttgatncaactctgaaatctctcaataaccagattgagacccttctcactcctgaaggctctagaaagaaccctgctacgacaaaatcactagtg

SEQ ID NO: 98 - DNA, 2622 bp, Rattus norvegicus
gcgcgctgcaggaagagtggcagaccgaagcggcctcgggctgcaaacggaggggcgctcgcgcggcgacggctgcagggctgacaccgctcagggcaggggggtcccaggcggctggaacgctctattctgaactgtgagtggatgatgctgttgcagccaagctgctgaacacactccgtggactcttccctgctgtgccttgcccatcggccgagataaaatggaagactcctacaaggataggacttcactgatgaagggcgccaaggacattgccaaagaggtgaagaagcaaacagtgaagaaggtgaaccaggcagtggaccgggcccaggatgaatacacccagcggtcctacagtcgattccaggatgaagatgatgatgatgactactacccacctggagaaacctacagtggggaggccaatgatgatgaaggctcaagtgaagccactgagggtcacgatgaagaagacgagatctatgaaggggaataccagggcatccccagcacgaaccaagggaaggacagcatagtgtctgtaggacaacccaaaggagatgagtacaaggaccgcagagagctggagtcagagaggagggctgatgaggaggagctcgcccagcagtatgagctgataatccaagagtgtggccatggccgtttccagtgggcccttttcttcgtcctgggcatggctctcatggcagacggcgtggaggtgtttgtggtgggctttgtgttacccagtgcagagacagacctatgcataccgaattcaggatctggatggctaggcagcatagtgtacctcgggatgatggtgggggcgttcttctggggaggactggcagacaaagtgggaaggaagcagtctcttctgatttgcatgtccgtcaacggattctttgccttcctttcttcatttgtccaaggttacggcttctttctcctctgtcgtttgctttcaggattcgggattggaggcgccattcccactgtgttctcctactttgctgaagtcctggcccgggagaagcgcggtgagcacctcagttggctctgcatgttctggatgattggcggtatctatgcttcagccatggcctgggccatcatcccccactatgggtggagcttcagcatgggctcagcctaccagttccacagctggcgcgtcttcgtcatcgtctgtgccctcccgtgcgtctcctcggtggtggccctcaccttcatgcccgaaagccctcggttcttgctggaggtaggaaaacatgatgaagcctggatgattctgaagctaattcatgataccaacatgagagcccggggccagccagagaaggtcttcacggtaaataaaatcaagactcccaagcaaatagatgagctgattgagattgagagcgacacaggaacctggtaccggaggtgttttgttcggatccgcacagaactgtacggaatttggttgacttttatgagatgcttcaactacccggtcagggaaaacaccataaagcttacgattgtttggttcaccctgtcctttgggtactatggactgtccgtttggttcccagatgtcattaaacacctccagtctgacgagtacgccctgctgactcggaatgtgcagaaggataaatatgcaaactttagcattaacttcaccatggaaaaccaggtccacaccggaatggaatatgacaatggcaggttcctcggagtcaaattcaaatcggtaaccttcaaggattcagtgtttaagtcctgcacctttgacgatgtgacctcagtcaacacctacttcaagaactgcacgtttattgataccctttttgagaacacagattttgagccctataaattcatagacagcgagtttcaaaactgctcgtttcttcacaataagacgggatgtcagattacttttgacgacgactacagtgcctactggatttactttgtcaactttctcgggacattggcagtgttaccaggaaatatcgtgtctgctctcctgatggacaggatcgggcgcttaacgatgctaggtggctccatggtgctctcggggatcagctgcttcttcctgtggtttggcaccagcgaatccatgatgataggcatgctgtgcttgtacaacggactgaccatctcagcgtggaactctcttgatgtagtcacggtggaactataccccacagaccggagagcaacgggctttggcttcttgaacgcactctgtaaagcagcggccgtcctgggaaacttaatattcggctccttggtcagcatcaccaaagcaatccctatcctgctggcttccaccgtgctcgtgtgtggaggactcgtggggctgcgcctgcccgacacaagaacccaggttctgatgtgacaaaagccattctcttctctcaccatgggtcagccctattgcctgactcaaggcttcagagtttttatgtatagaaaggtggccaagtatcagaactcaaacttttgctgtgacgtaaatgtagctgtgtattgtccccgccagtgtgatttgcagggtcctccccctcccccgcgccttgttatcttttcctaattgtgatgttcctgcttccg

SEQ ID NO: 99 - DNA, 1417 bp, Rattus norvegicus
gtcctgctctcaaccgcagcctgcgccctaccttctgcagctccagcctactcctgaccgacagcatcatggctctcagaggcaccgtgactgacttctctggattcgacggcagggctgatgccgaagttcttcggaaggccatgaaaggcttgggcaccgacgaggacagcatcctgaacctgttgacagcccggagcaacgctcagcgccagcagattgctgaggagtttaagactctgtttggcagggaccttgtgaatgacatgaagtctgaactgaccggaaagtttgagaagttaattgtggctttgatgaagccctcccggctctacgacgcctacgagctgaaacacgctcttaagggagctgggacagatgagaaagtgttgactgaaatcattgcctcaaggacacctgaagagctcagggccataaaacaagcttatgaagaagaatatggttccaacctggaagatgatgtggtgggggatacctcagggtactaccagaggatgttggtggtcctccttcaggccaatagagaccctgacactgcaattgatgatgctcaagttgaactggatgctcaggcattgttccaggctggagagctgaagtgggggacggatgaagaaaagttcatcaccatccttgggacacgcagtgtgtctcatttaagaagagtgtttgacaagtacatgacaatatcaggatttcagattgaggaaaccattgaccgagagacctcagggaacttggagaacttactcctggctgtcgtgaagtctattcggagcatacctgcctaccttgcagagaccctctactatgctatgaagggtgctgggacggacgatcacaccctcatcagagtcatagtgtcgaggagtgagattgatctgtttaacatcaggaaggagtttaggaagaacttcgccacgtccctgtactctatgatcaagggcgacacatctggagactataagaaggccctgctgctcctctgtggaggcgaggatgactgaggagctgcctggagtgccctgggcccgcctgctgcccaccatcagcttccttcagcaccacgcctacttacgttcaatgcctgcctgcctgccacgctgccttactcacacgagtgtgtgctaatgaccaaagctgtctcgaatgaaagcagtgttctgctgttctgtctgacagaccttcccacgtctctcagtctagtatctctaagttgcgttttctatcctcttctaaagcttcatttatattaagttaataaccatattaccttgaacggaaccttagccatgaaattgtgaactcttggaagtgctgtcaatcaagcttagtgctctagctgacctgaaaaattaagatggtcgtaatatcagaaacgttgccgacaaataaa

SEQ ID NO: 100 - DNA, 4801 bp, Rattus norvegicus
ctgcagaagccaagccctgccccacccctgcccctgcctcctgtcctcttgtggtgccaaagctccctgaagcagaaaaacttcttatattcagtctaacagacctatctctcttaagggcaaagcgactcagctcctccctgtccccctgtgtgaaagaaagagcagtagccctcttctcccagcagctctgcccactcacagatctgcctgccgtcctcctctttcctcccctggaccttggctcaaggaccaggtatgaaggatcccccaagtccttcaggcctgaagtaagagtcaacccagccttaagtcatctcccatccaagaactgggtctaaaacgttccccatttctaaccttcaagacagacctgatgttaaatccttccctggaaggaagggtgctttcccccttcccaggggtgctcatccctcaccctggggagaccatgttggtgaggtagggggagaatgttttctgaaggccagttcctctcccctcctccagctcaaaacaatctcaccgtcctcctgccatcccatttgggacaagatgacaggatggcactcactttggagacctcagaaaagccccttccaggagagctgctggtctgtgctgtacaggaagggtgacagcatctgccttctcctggcagcctccacacctgctgtgcttaggacaggatcctttgatcacaaagcagaaccctaatcctgttccatctactcaaactggaacacccaggggccttttcctggtctcccaacttcccacctagctcaccctacccctaactggtgagaggctgagtttgggctgaattgtggcccttcagaatacagtccaggcaggctgtggggcctctgggggggccagggaccacccctctacccctttcctcccattccttcagcctgcacctgcccctccttgaattattgtctctctctctctttttttttttaagtggatgccttactttttggataactatttttgaagctggtatttctatttcttttggattttttaatgtatggtggtttgggggcagagctagaaccttaatcgtctgtcgctgagttcatttaggttttaaattttattggtttgttttatggagtattttcccgctgcgcccttccggccctcgcaaggcttcctgagccggaggctaaaaagctccatcaaacgtacaaagtcacaacccaaacttgaccggaccagcagctttcgacagatcctgcctcgcttccgaagtgctgaccatgaccgggcccggctgatgcagagcttcaaggagtctcactcccatgagtccctgctgagtcccagcagtgctgctgaggccctggagctcaacctggatgaagactccattatcaagccagtacacagctccatcctgggccaggagttctgctttgaggtaacaacatcgtctgggacaaaatgttttgcctgtcggtctgcagccgaaagggacaaatggattgagaatctacagagggctgtgaaacccaacaaggacaacagccgccgggtagataacgtgctgaaactatggatcatagaagctcgagagctgccccccaagaagcgatattactgcgagttatgcctggacgacatgctctatgcacggaccacttccaagccccgctcagcctcaggagacactgtcttttggggcgagcacttcgagtttaacaacctgcctgctgtccgggcgctgcggctgcatctgtaccgtgactcggacaaaaagcggaagaaggacaaggcaggctacgttggcctggtgactgttccagtggccaccctggctgggcgccacttcacagagcagtggtaccccgtgaccctgccaacaggaagtgggggctctgggggtatgggctcggggggaggaggggggtcagggggcggctcagggggcaaagggaaaggaggctgtcctgctgtgcggctgaaggcccgttaccagacaatgagtatcctgcccatggagctatataaggagtttgcagaatatgtgaccaaccactaccgcatgctgtgtgccgtgctggagcccgccctcaatgtcaagggcaaggaggaggtcgctagtgcactggttcacatcctgcaaagcacaggcaaggccaaggacttcctttcagacatggccatgtcagaggtagaccggttcatggagcgggaacacctcatattccgcgagaacacgctcgccactaaagccatagaagagtatatgagactgattggccagaaatacctcaaggatgccattggggagttcatccgggctctgtatgaatctgaggagaactgtgaagtagaccccatcaagtgcacagcgtccagtctggcagagcaccaggccaacctgcggatgtgctgtgagttggccctgtgcaaggtggtcaactcccattgcgtgttcccgagggagctgaaggaggtgtttgcatcatggcggctgcgctgtgcagagcggggccgggaggacattgctgacaggctgatcagcgcctcgctcttcctgcgcttcctctgcccggccatcatgtcgcccagtctgtttggactgatgcaggagtacccagatgagcagacctcacgaaccctcaccctcatcgccaaggttatccagaacctggccaacttttccaagtttacctcaaaggaggacttcctgggcttcatgaacgagtttctggagctggagtggggttctatgcagcaattcttgtatgagatatccaacctggacacactgaccaacagcagcagttttgagggctacatagacttgggccgcgagctctccacacttcacgccctgctctgggaggtgctgccccagctcagcaaggaagccctcctgaagctgggcccgctgccccggctcctcagcgacatcagcacagccctgaggaaccctaacatccaaaggcagccgagccgccagagcgagcgcgctcggtctcagcccatggtgctgcgcgggccgtcagccgagatgcagggctacatgatgcgggacctcaacagctccatcgaccttcagtccttcatggctcgaggcctcaacagctctatggacatggctcgcctcccctccccaaccaaggagaaacccccgccgccccctcccggtgggggtaaagacctgttctatgtgagccggccaccactggcccggtcctccccagcatactgcacgagcagctcggacatcacagagccggagcagaagatgctgagtgtcaacaagagtgtgtccatgctggacctgcagggcgacgggcctgggggccgccttaacagcagtagtgtttccaacctggcagctgttggggacctgttgcactcaagccaggcttcactgacagcagccttggggttgcggcctgcacctgccgggcgcctctcccaagggagtggctcttccatcacagcagccggcatgcgcctcagccagatgggtgtcactacggatggtgtccccgcccagcaactgcgcatccctctttccttccagaaccctctcttccatatggctgccgatggaccagggcccccagcaggccatggagggagcagtggccatggtccaccttcctcccatcaccaccaccaccaccatcaccatcaccgagggggagaacccccaggggacacttttgccccgttccatggctatagcaagagcgaggacctctctacaggggtccctaagccccctgcggcctccatccttcacagccacagctacagtgatgagtttggaccctctggtactgattttacccgtcggcagctctcacttcaggacaacctacagcacatgctctccccgccccagatcaccatcggtccccagaggccagctccctcagggccaggagggggcagtggtgggggcagtggtgggggcggtgggggccagccacctcccttgcagaggggcaaatctcagcagttgacagtgagtgctgcccagaaaccccggccgtccagcgggaacctattgcagtccccggaaccaagttatggtcctgcccgtccacggcaacagagcctcagcaaagagggcagcattgggggcagcgggggcagcggtggcggagggggtggggggctcaagccctccatcaccaagcagcattcccagactccatccacgctgaaccccacgatgccggcctcggagcggactgtagcctgggtgtccaatatgcctcacctgtccgctgacatcgagagtgcacacattgagcgggaagagtacaagctgaaggagtactcgaagtccatggacgagagccgactggacagggagtacgaggaggagatccactcactgaaggaaaggctacacatgtccaaccggaagctggaagagtacgagcggaggctgctgtcccaggaagagcagaccagcaagatcctgatgcagtaccaagcccgcctggagcagagcgagaagcgcttgaggcagcagcaggtggagaaggactcccagatcaagagcatcattggcagcccgtcccttcaggctgatgctggtggaggaggagctgcgccgggaccaccccgccatggctgagccgctgcctgaacccaagaagaggctgctcgacgctcaggagaggcagcttccccccttgggtccaacaaacccgcgtgtgacgctggccccaccttggaacggcctggcccccccagccccaccccccccaccccggctgcagatcacagagaacggcgagttccggaacaccgc

SEQ ID NO: 101 - DNA, 1079 bp, Rattus norvegicus
tacagactcctttttctgtttgcagtcaaagttgtccacttggatttaggaaaacacctgttgaagggaaacccttctgttgttttgattgtctcctatgtccagatggagagattgcaaatgaaacagatatggatcaatgcatcaagtgtcctgaagatcaatatccaaatactcagaggaatcagtgtctccctaaaattacagattttttgttccacgaagatactctgggagctgttttggtcttcgtggcccttagtttttctgccttttcagctatgattttaagattatttatctgctatcgggacacacccattgtcagagcaaataacagaaatctcagttatctcctcctcgtttctctaatgctctgtttcttttgctcattaatattcattggccaacctaaaacagtcacttgtgtcttgagacaaatgatttttggggttgtattttctgttgctgtttctactatcttggcaaagaccttcattgtggttgtggccttcaaggccatcaaaccaggaagtgccttaaaaatgtcgatggtgatccgactctcaaacactatagtcttctgtggttccatcattcaagtgtgcatctgtgcagtctggctgggaacgtatccccctttccctgatgtcgacatgcactcagagtttgggcaaatcatcctctggtctaatgaaggctctacctttgccttctattgtgttctgggctacttgggctttctggcgagtctcagtttgcttattgcttttctggcaagaaggctacctgacagcttcaatgaggcaaaaacaatcacgttcagcatgctggttttcttcagtgtgtggatttcttttgtacctgcttacctgagctccaaaggcaaaaccatggttgctgtggaaattctttcaattctggcttccagtgctggcttactgggctgtatatttcttcccaaatgctatgtgatcctaatgaagtcaggtgaccattctagaaagaagttctttaaatgacttcttctttaagacaaaggaatttattgtgatttgtgttaagtgaaccatgtacaa

SEQ ID NO: 102 - DNA, 4450 bp, Rattus norvegicus
cagggatgaggaaacacctgtagaaaaggaaacctgaatacaggtatagcatcttcttggccagtgtagaagatggggataattgctacctgtttgctgatctgtgcagcaattaactaccaataatgtccaggctcagagcaggaaaaaatatgctcaccttcattttactcttctttctcctgaacattccactttttgtgcctagttttatttatcccaggtgcttttggagtatgaagaagaatgaatatcaggatagaaacctgggaacaggttgtatgttctttattctagcagtgcaacagcctatggaaaaagagtatttcagtcatatttcgaatatacaaacacctactgaaaaccaaaagtatcctctcaccttggctttttccatgaatgaaatcaacaacaaccctgatcttttgccaaatatgtctttagcatttacattctcagaatatagttgttatttggaatcccaccacaaaagattatttaatttttctttaaaaaatcatgaaattctccctaattttatctgtacaaaagacatcaagtgtggagtggtacttaccggacttagtttggtaacaactgtgacacttcatataatcctaaacaatttcatatttcagcagttccgtcagcttacttatggacactttcatcctgctctgtgtgatcatgaaaattttcctcatctatatcagatggcctctgatgatacatctctagcccttgctctcgtctccttcataattcatttcagttggaactggatagggttggccatctcagacaatgatcaaggcatacattttctctcttatttgagaagagagatggaaaaaaatacagtctgctttgcctttgtcaacattattccagtcaatatgaatttatacatgtcaagagctgaagtgtattacagccaagttatgacatcatccgcaaatgttgttatcatttatggtgatacagggaatacgttagctgtgagctttagaatgtgggactctctaggtatacagagactatgggtcaccacctcacagtgggatgtcactccttttaagaaagacttcacatttgataatggatatggaacttttggttttggacaccgccacagtgagatttctggttttaaatattttgttcagacattgaaccctttcaaatactcagatgaatatttggtaaagctggaatggatgtatgttaattgtaaaatcttagaatataactgtaagtcactgaagaactgctcctttaatcactcattggaatggctaatgacacatacttttgacatggccattattgaagggagttatgaaatatacaatgctgtgtatgcttttgcccatgcactccatgagatgactcttcaaaatgttgataatgttctccttcccaattatgaagaacaaaattataattgcaagatggtttattcctttctgagcaagactcaattcacaaatcctgttggagacactgtgaatatgaatcaaagaaacaaactgaaggaagagtacgacattttctacaattggaattttccacagggacttggatttaaagtgaaaataggaatatttagtccatattttccaaaaggtcaacagcttcatttatctgaaaatctgatagagtggtccacaggacgtatacagatgccaacctctgtgtgcagtgccgattgtggtcctggatttaggaaagtctggaagaatggaatgccagcctgttgttttgactgcagtccctgcccagaaaatgaaatttctaatgagacaaatgtggaattgtgtgtccagtgtccagaggaccaatatgctaaccaagagcagaatcactgcattcacaaagctcgtatctttctctcttatgatgaacccttggggatggctctttccttaatggccttatgcctcgctgcactcacagttgtggttcttggagtctttgtgaaacatcacagaactcccatagttaaggccaataactgcactctcacctacatcttgctcatcgcactcatcttttgtttcctctgccccttgttcttcattggccatccaaactcagctacctgcatccttcagcaaatcacatttggagttgtgttcactgtggctatttccactgtgttggccaaaacaaccactgtcattctggctttcagagtcacagcccctcatagaatgatgaagtactttcttgtttcaagggcatctaactacatcattcccatttgtactctcattcaaattattgtatgtgccatctggctaggagcttctcctccttctgttgatattgatgcacagtctgagcatggtcacatcatcattgcttgcaacaagggttcagtcactgctttttactgtgtcctgggatatctggcctgcctggcctttgtgagcttcaccctggctttcctttccagaaacctgcctgtcaccttcaatgaagccaagtccatgacattcagcatgctggtgttctgcagtgtctgggtcactttcctacctgtttaccatggcaccaaaggcaaggttatggtggctgttgagatcttttccaccttggcttctagtgcaggaatgttgggatgcatttttgctccaaaatgctacacaatactgtttagaccagacagaaattctcttcaaatgatcagggagaagtcatcttctcatactcacattttataaagtctgactgacacaggcattgttggttcataatcaccaaatattcgattacattgccatatctatttttagaatgactgtcactgttccctttgatgatattgcgtagcaagatcatgtctactgaggactaccttatctcctataatcttccaacattttctacatcaatcctactcttttagagaaagagataatagaattttaaacattttcagaattagagttcttctaggaacagagaagagaaagaattattttttcaacaggttgatagaatatcaggaaaggggttgaagtcacaacaatataaataaagccctgctcttgtataggaacttatgaatactcaatcccaccaactaccattaacaaccacatgtaacaaatgttaaaaaggatcagatggtttcttattgtctccaaatttgcctgaacttatttatgcacataatgagacacacacacacacacacacaaacacacacacaaatacaaattccataaaattttaaaaatatagaatattacaaagacttaacactggcaatctgctcttcaatgttcataattacaggaacttacaggaaaatatgggacataggtagagatgactgggtttatgttaagtcattttaaataagaaccctcaattttaagtgtatcataaaagacacagttgtgaaattttcaaggacagcactacttgttgaaataatctccatctgtggaatttatagggttttgtgacaaagatcagttctgatatcagagagtaaactgaagcaggcaaccattagttgtcagcactgacagcagctaatggaggttgcttcagaaatcaattgaggttgattctggcaatgagcagttagagaagataaaaaacagggaaatcaaatattcacacacacacacacacacacacgtacactcacatgcacaagcaagtgcatgcatgcaaacccacacagactacttgaagcaaaggcaaggtccagccacttgaaacatacaaatgtgtacatatagacagacacagacaaacacatacatatccacatgttaaatggctggagcaatgtcagccagcaggctccatgtatttcacatatgtacatatatgcatgtaaataaatattcagatatacacatattcacatgtactggtgggtaggtggaataaagttccaaaaaacaggccccaggaattttacacataatgtacagacatatataacactattggtggaagaacaagctccaacatattcagggaagcattgcatatacatacatatagatttgatggatggaacaaagttccaacaaattctcacatgaactttatatatgtatatacatgaaaggcagcctggttcccagttgatcagaggtttgaaagcccagtgaccctaaaaaagatggtagccatttagcctgattcccagtaaaccaggcaagtcactagccacagccctccatagaattttggccatcagtcacttaagcccaacaccctccacagattaaaggaagtgattacaggtcacagggactcagaacacatttccattatgtgacatagtcaaagacttggagacttagccaatgaactttccttccctgaaactcctccctgcaggccaaccttgaaaagaggggtatggttttactcatctgctttcagccatgacaataaatgacttaaaacaatgaaaaaa

SEQ ID NO: 103 - DNA, 2805 bp, Rattus norvegicus
  misc_feature (1)..(2805): n = a or c or g or t
gaatttcgggagaaagcctttcagtcatcatggtctctccccacacaccgcagtgctgtaaaatccacagaggaacaaagtatcagttcgtctagaccttataacaccagaggatgggagctccgttttctctgtcctcgtaccaaaagaagctcagccgagcttgggcattgaaccaggtcggcgcaggtgagggngagngaatggaggggtggggggtagaggagggtggggtggggtggggcagcactcaggaaaccgtgccgctgaatcgccacaccagacccttcctctcctttctccaatctgtatcctgagtcctgagccctgctccccctcctggccccaacacctccacaagttctggaagaagggtttgtgacttactaccttccgccaggcatccattccttgcagttttttgccactgctgtgacccagcctagttcgagggagcattccttcatctttgtcggctttgtggacgacacacagttcctgtgtaacaacaatcagggggaaagtcagagaatggagccgcgcgctctgagggtaaagaatatggggcccgaatattgggagcggcagactaggatggtcaaggacatttccaagaattccctagtgaaattgcgggaggccatgagtgtctacaaccacagcgaggatggtgagtgaccccttcacatcctttaaggacgatcctgagttcccgggtcctcggctccgaggtttggcccgaggttgcaaggactcacgggatccaaggaccgggttttgtgcacagtttttggtccaaatacgacccgggcggggccaggcactcatgtctttcagtgtgtgtctggctgtgacgtggggccagatggactcttcctccgtgggcacgagcagcacgcatacgacggccgcgactacctcgctctaaacaaggacctgcactcctggacggcaggtgacacagcagcgcagatcacgcggcgcaagtgggaggaagctggtgtcgcggagcaaaggcgaacctacctgaagggcgagtgtgtggagtcgctccgcacatacctggagatagggaaggagactctgctaggagcaggtacgcggccggccgcgaggaatctcctccatctatctttgggttggtgctcacagtctccctagaagggaggaaagtgggctgggctagaaaactgcttctcttctttgcatctgaagagggaagagtgttctgggtttcctaatctaatactagacagatactctcctgactttctctcagttgagttgagactcgtctcaggaaaggaggagagacgatcctggaacagctgctcccttcagtctgcagcccttttgtgagccatggcctttctcaggccctgttctctgcccacacccaacctctttggagtcttgactccggtgatgctaagtctctcagccctcacccagtcagaacctttctcctttctccgctgggagtcccgaagttcatcttgtctgagtcatcctatttctagagctttccaaggaattccggatgcctgattctagaatactgtatggtgcttaaatccctcaaacactcattctatttccaggatggcctataaacattgccacagttcagggaagaatccaagattcccgaattgtccaactcttttcctcagatcctccaaaagcacatgtgacccatcatcccagccctgaaggtgataacaccctgaggtgctgggccctgggcttctacccttctgacatcaccctgacctggcagcgggatggagaagacctgacccaggacatggagcttgtggagacaagacctgggggtgatggaaccttccagaagtgggcagctgtggtggtgccttctggggaggagcatagatacacatgctgtgtggagcatgaggggctaactgagcctctccttctgaaatggggtaaggagtggtgtggacacagagatgatcgttaggaaaagtggaagctcttctggagaccctgagaaggtcatgggtaagagctgagggctcacaccttctctttctttccctttctttcccagacccttctaagcacaccatccccatcatgggaatcactgctggcctggttttccttggagttgccttcactggagctgtggttgccatagcgatgaggaagcagagaggtaggaatgggttatatctgagggcctttgtcttactgttagtataagatacacacatatatgtgtgcttatctaatctaggatgtcgtgttctaactccttctaaagcacatttggaaagaagtgacaaatacctcacatggacatgactcaacatgacatccagatgggacaggtctccaagctggaacttggaatacgagaagaaaggatctcccttctcttatttcctgattctgctctagtcttccgatgataattccaaaaacattcctgaagtgctaaaccccgggaattctgctaggatcccccatcctgcctctctccccatctttttcttcccacagacgtaaaaggacgtggttactcagtgtattcagagagttgacttttcccattctgtttccatcccttggccatttgtttcacctcttgaactctgtacttcagggggatacccctctgagagtctagaaaggaagcagagaccatgtctctccaccaccttcccataagcattcctgcagctgagcacagcatgaatccttgctggatgaccacgtgctggactttgcttcagcacacagcgataagggaaggctgaaactgcagagaatgtgctc

SEQ ID NO: 104 - DNA, 3113 bp, Rattus norvegicus
ttcaaaaaaaaaataataacaaatccaaaaaacacacccacgcaagcccactgacccggttctgtgtgaagtgggcgacggaaccagggtccctggaatggcggagactctgtcgggtttaggagactcgggtgcggcaagcgcagcggccgtgagctccgcggcgtcagagaccgggacgcggcggctcagcgacctgcgggtgatcgacctgcgggcggagctgcggaagcgaaacctcactcgagcggcaacaagagcgtgctgatggagcggcttaagaaggccattgaagaggaaggtgggaatcctgatgaaattgaagtcatctcagaaggcaacaagaagatgcctaagaggcccagcaaagggaagaaaccagaagacgagggtgtggaggacaacgggctcgaggagaattctggggatgggcaggaggatgtggaaaccagcctggagaacctgcaagacatggatatgatggacatcagtgtgctggatgaggctgacattgataatggcagcgtggcagactgtgtggaggaagaagaggaggccacactccctgagggcctaggactgctccgaattggccgattgcaatcgaaggggctccccgaacagctgcaggagcttgctatagatgacaaggaagccattaacaatgtagatacatcatcatctgacttcaccatcctgcaggagatggaagaggcatctttggagccagaaaatgagaaaatactcgacattttgggggaaacttgtaaatctgagccagtaaaagaagaaggttcggagctggagcagccctttgcccaggccacgagtagcgtggggccagacaggaagctggcggaggaagaggacctatttgagagctgcggccacccggaagaggaagaagaagaggaggaagaagaggagcaggaagaggagcaggaggaggagggagatttagctttggccagcagcagcaagtctgagtcttcaagcactcgatgtcagtggagcgaggcagacgccctgttagcagtagtgaaaagggagccggcagaggcgcctggcggaggcactgggatggaccgcgagcctgtagggctagaggagccagttgaacagagtagcacggctgcccagctcccggagaccaccagccaggagctggtgcgagcgcccacggcagccccgagccctgagccccgagatagcaaagacgacgtgaagaagtttgcttttgacgcttgtaatgacgtccctgcggctcctaaagagtcctcagccagtgagggcgctgatcagaaaatgagttctgtggaagatgactcggatacaaaaaggctttccagagaggagaagggtcgcagcagctgtggtaggaatttctgggttagtggcctttcatctacgaccagagccacagatctgaagaacctttttagcagatacgggaaggtggtgggagctaaggttgtgacgaacgcccggagtcccggagctcgctgttacggctttgtcactatgtccacagctgaagaggcaacaaagtgcattaaccatttgcataagactgagctgcatggcaagatgatctcggtggaaaaggccaaaagtgagcccgctggcaaaagagtacctgacaggcgagatggcgacagcaagaaagagaagaccagcaccagtgacagatctgcaaaccttaagagggaggagaaaggtgacagaaaagacgatgccaagaagacggatgatgggagcacagagaagagcaaggatgcagatgaccaaaagcctgggccttcagagcgctctcgaacaaccaagtcaggaagccgtggcactgagcgtactgtggtgatggacaagtccaaaggtgtgcctgtcatcagtgtgaagacttctggttctaaagagagagcctccaaaagtcaggaccgaaagtctgtcagccgggagaagcggtctgttgtgtcctttgacaaggttaaagagtctcgaaagtccagagactcggagtcacggagggagcgggagcgggagcgcagtgagcgggagcaaaggctgcaggcccagtgggagcgggaggagcgagagcggctggagattgcccgggagcgcctggctttccaccgacataggctggagcgtgaacgcatggagagggaacggttggagcgggagcgcatgcatgtggaacaggagcggaggcgtgagcaagagcgcattcaccgagagcgagaggagcttcggcgtcagcaggaactgcgctatgaacaggagcggaggcctgctgtgcgcaggccctatgaagtagatggccggcgagatgatgcctattggccagaagctaaacgggctgcgctggatgaccgttaccactcagacttcagtcgccaggaccgctttcatgacttcgaccacagagacagaggccgctatcccaaccactctgtggataggagagaaggttcacggtcgatgatgggagacagagaaggacagcattaccctgagcgccatggaggacctgaacgccatggccgggactctcgagatggctggggctatggctcaaacaagagactgagtgaaggccgggggctgccccttcttcccaggcgtgactggggagagcatgcccggagacttgaagatgaccgggcatggcagggcacagctgatggaggcatgatggagcgtgatcaacagagatggcaaggtggtgagaggagcatgtctggccactcagggcccggtcacatgatgaatcgtggtggcatgtcagggcgaggcagttttgcccccggaggagcttcccgtcgccatgtgatcccacgtggagggatgcaggcaggcttcggcgggacagagccggggcagcagacccagtgatgcccgcttcacccccgtattgagcacctaaaccacccaaccatgacctccaagtctttttaggaaaccctcccgccattgtacaaaggatttttttttttttatttgctgccatattgtagcttgttacgatggaatttgttttcatttttgttcctgtttttttgtaataaagggttttgttcaaaaaaaaaaaaaaaaaaaaaaaaaaaaaaaaaaaa

SEQ ID NO: 105 - DNA, 1804 bp, Rattus norvegicus
tcaacaggagtgcagccaccagagtcaaggctgttggacactctcagagctagaggctgcccctcccgaaggcctcaggagatgtgaggttcaaccctaaatccagagtcaggtccaggtccccagaggagaggagccctggtgaggaaacctcaaagtcaagtctccattcagccttcacaggcctttgcaggaagcagaagcagaggcaatgggtgctggcggcccgcggcggggtgctggtcctccagatggtggctggggctgggtggtactgggcgcctgcttcgtgatcactggcttcgcctatggcttccctaaggctgtgagcgtcttcttccgagagctcaagcgcgacttcggggcaggttacagtgacacagcctgggtgtcctccatcatgctggctatgctctacggcacgggccccttgtccagcatcctcgtgacgcgctttggctgtcgcccagtgatgctggctggtggactgctggcttcagcgggcatgattctggcttcctttgcctcgcgcctcctggagctgtacctgacggctggggtactcacaggcctgggcctggctctcaacttccagccgtcgctcatcatgctggggctctacttcgagcggcgacggcccctggccaacgggctggcagcagcaggcagcccggtgtttctgtccacgctgtcgcctctcggccagctgctgggggagcgctttggctggcgcggcggcttcctgctgtttggcggtctcctgctgcactgttgcgcctgtggggctgtcatgcgtccgccccctggaccccagccgcgcccagaccctgcgccccccggtggccgggctcgccacaggcagctgctggacttggcagtgtgcactgaccgcactttcatggtatacatggttaccaagttcctgatggcgctcgggctctttgtgccggctatcctgctggtgaactacgccaaggacgcgggtgtgcctgatgccgaggccgccttcttgttgtctatcgtgggcttcgtggacatcgtggcacggccagcgtgtggtgctttggcgggcctggggcgactgagaccccacgtcccctatctcttcagcctggccttgttggccaatgggctcacggacctgattagcgctcgtgcgcgctcctacggcacccttgtggctttctgcatcgccttcggcctctcctatggcatggtgggcgcgctgcaatttgaggtgctcatggcaaccgtgggtgcaccccgcttccctagtgcattgggcctagtgctgctcgtggaggccgtggctgtgctcataggaccgccctctgccggccgcctggtggatgctctgaagaactatgaaatcatcttctaccttgctggctctgaagtggccttggcaggagtcttcatggcagttaccacctattgctgcctgcgctgctctaagaacatctcatcaggtcgatctgctgagggaggagccagcgacccagaggatgtggaggctgagagggactctgagccaatgcctgccagcactgaggagccgggcagccttgaagctctggaggtgctgagcccccgggctgggtccccagaacaagaaccagaggaggaggcagtgcctgagctggatcacgagtccataggtggccatgaggcacgaggccagaaggcatgaaactgtggcttcctctctgagggcctggtacatggggagccagcctggggtggtctcttgggaacccaatatgttagaccctgttcacagtgaataaagggcccctaaaagatg

SEQ ID NO: 106 - DNA, 2474 bp, Rattus norvegicus
gttgctttggggctaccgcgcgcccgcgctcgttcccagctccggtcccgcgctgtgcggtcgcgcgcttggtcggcggccatgtgttcgctggcggcggggaacggacaaggcgcggagctggggccggagcccttggagctgtcggacagcggagacgacgcgggctgggaggacgaggacgcggacgctgagcccgcacagggccggcagcacacaccctgcctgttctgtgacaggctcttcaggtctgctgaagaaacgttttcacactgtaagttggagcatcaatttaatattgatggtatggtccacaaacatggactggaattttatggatacattaaactaataaattttattagacttaagaatcctactgttgagtacatgaattccatatacaaccctgtgccttgggataaagatgagtacctgaagccagtgttggaagatgatcttttgcttcagtttgatgtagaagatctttatgagccagtgtctgctcccttcacataccccaatggactcagcgaaaacacatctgctgttgagaaattgaagctcatggaggcccgggcgctgtctgctgaggcggctctggctcgggcgcgtgaggatctgcagaagatgaaacaatttgctcaggactttgtgatgaacgtagatgtcagaacctgctcctccacgactaccattgcagacctgcaggaggacgaggatggcgtctacttcagctcctatgggcattatgggatacatgaagaaatgctaaaggacaaagtgcgcacagaaagctacagagatttcatataccaaaatccacacatcttcaaagataaggttgttctggatgttggctgtggaactggaattctctccatgtttgctgccaaagctggggcaaagaaggtgattgcagttgaccagtctgaaatcctctaccaggctatggatatcataaggctaaataaacttgaagataccattgtactaattaaaggaaagatcgaagaagtgagtcttcctgtggaaaaggtggatgttattatatcagagtggatgggctattttcttctttttgagtcgatgttggattctgtcctttatgccaagagcaaatacttggcaaaagggggatcggtctaccctgacatttgcaccatcagccttgtggccgtgagtgacgtgagcaaacacgccgatagaattgccttctgggatgacgtctatggcttcaacatgtcctgcatgaagaaagcagttataccagaagctgttgtggaagttgtagatcacaagactctcatttcagacccttgtgatatcaagcatatagattgccacaccacatctatctcagacttggagttttcttcagactttaccctgagaaccacaaagacagccatgtgcacggcagttgctgggtactttgatatatattttgagaagaactgtcacaacagggttgtattctctactggcccccagagcaccaaaacacactggaaacagacaatatttcttctggaaaagccttttcccgttaaagcaggtgaagccttaaaaggaaagatcacagttcacaagaacaagaaggatcctcgttccctcattgtgaccctgaccttgaacagttcaacccagacttacagtctccagtgacagtcatggtctccagccgccacaaagtctgaagcacacccaactgtctgttaaagcgggataaggcaatcagcaggaggggcaggctccacggggctgtagcatggctgctcctggtcctgcagctactgggtagtaagcccaaataaagcagagagctcagtggaggcctgtgccctccttcctcctactgcttctgctcctagagatcctagtcacagaagcctgcttggccagattagctgaagagacttcctctcctgctagactgagagtcatttgaattggcttacttttggaacagtaatagtcctggtttttaaattatatatatgtttcttactataaattttgtttttaataatgagcaacacaaagcagtgttttactgtagatttcctttctagaggaacagtttttagttacactctttgctgcaatatcaggatatcttaagactagggagccagtggatgggacacagcagcgtctctcacacattctgtttgcaggggctgtgctgcggtcctctccacccacctgcagctcagctgtacccctcagtgttctccagccatagcctagcaatgtggggaagtctaacttcagtgcacagcctaggtgtgacagactactcttcaggctgggatagaggtatctaaaatgctgcctttacagaccaggtttgtgccaaggccatgtatccatctgctagtactgtaaaatcatgatattcaggttgaaaaaatgaaaaatatccaataaaatgtgtaactattgaaataaaaaaaaaaaaaaaaaaaaaa

SEQ ID NO: 107 - DNA, 7247 bp, Rattus norvegicus
ggccgcctcggaggtccgtgcagggctccggtgagcgcgaggaggtgggaacacgcgacgcccgctctccattacgggcgcggtgggccgaagcctggctcgagacccgaaggcgctgacaaggaccttctggccacgcctgctcctccgcgcgccccgccgctgcgcccggaggcgcccagggtgggtcactgggaccgcagctcgaagccatccctttctgtgcgtcctttcattcaccttcacagcagcccagagagggactgtcaactggcacatcccccaccagtgatgggaagtgatcctccatggtggcgctgaatctctgaatatgattcgaattgcagccttaaatgccagctccacaattgaagatgaccatgaaggaagctttaaaagtcacaaaatccagacaaaggaggctcaggaagcagaagcctttgccctataccacaaggccctggatctgcagaaacatgacaggtttgaggagtctgccaaggcctaccatgaactcctggaggctcgcctgctgcgagaggcagtttcatccggagatgagaaggaagggctgaagcaccctggactgatactgaaatattctacgtataagaacctggcccagctggcagcccagcgggaggacctggagacagccatggagttttatttggaggccgtgatgctggattccacagacgtcaacctttggtacaagattggacatgtggccctgaggctcatccggcttcccctggctcgccatgcttttgaggaagggctccggtgtaatcctgaccactggccctgcttggacaacctcatcactgttttgtacaccctcagcgattacacaacatgtctttacttcatctgcaaagcactggagaaagactgccgctacagcaaaggcctggttctcaaggagaagatttttgaagagcaaccttgtctccgaaaggactcactccgaatgttcctcaaatgtgacatgtcagttcacgaggtgtcagtgaatgcagcagagacacaggccattgtagacgaggctctggggctgcggaagaagaggcaggcgttgatcgtgcgggaaaaggagccagacctgaaactagtgcagcccatccctttcttcacgtggaagtgccttggagagagcttgcttgccatgtacaatcacctcaccacgtgtgagcctcccaggcccagcctgggcaagaggattgacctgtctgactaccaggatcccagccagctgcttgccccctccatcgtggttactcctgtcagtgtggtccagccaagtcctgtttgcaccaatccaactgttgctgtggccgagcctgtgctctcctacacctctgtgaccacaaccagcttcccactgcacagtcctggcctgctggacacgggcactcctatgggtgatgtttccggaggagataaatctaaaaaaggggtgaagcgtaagaagactttagaggaaagtggggagacagcaaagcggaggtctgcccgtgtccgcaacaccaagtgcaaaaaagaagagaaggtggatttccaggggcttctggtaaagttcctgccgtccaggttaagaaaactggaccctgaggaggaagatgatccatttaacaactatgaagttcagtcagaagccaaactggagagcttctcgaacgtgggacctcatcgactgtccttcgattcagccacattcatggaatctgagaagcaggatgtgcatgcgttcctgatggagaacctgaccaatgggggcgtcctggagctcatgatgcgctacctgaagagcatgggccacaagttcctgctgaagtggcccccaggcctggcggaggtcgtacttagcgtctaccacagctggaggaggcacagtaccagcctgcccaacccattgctgagggactgcagcaacaagcacatcaaggacatgatgctgatgtctctttcctgcatggagctccaactggaccagtggcttctgaccaaaggcagaagctccacggtgtctccccggaactgccctgctggtgtggtgacaggcaggtttgggccagacttcccaggaacccactgcctgggtgacctcctgcagctgtcatttgcgtcatctcagcgggatctgtttgaggacggctggctggagtttgtggtccgtgtttactggctgaaggcacgtttcttggcactacagggcgatatggagcaagctttggagaactatgatatctgcacagagatactccagagctccacggctctccaagcccaggcaggggctgagcaaagggacattgtcatccggctgcccaacctgcacaatgactccattgtttctctggaggaaattgataagaacctgaagtctctggaaaggtgccagtccctggaggagattcagcggctgtttgaggcgggcgactacaaggccgtggtgcagctgctccggcccactctgtgcaccagtggctttgaccgagccaaacacctggagtttatgacttccattcccgagaggccggcccagctgcttctgctgcaggactctctgctccggctggaggagcacaggcagtgctttgaatgctctgacgtggccctcaatgaagctgtccagcagatgctgaactcgagtgactctgcggccaaggaggagtgggcggccacagtgacgcagctgctgctaggcatggagcaggcactgtcatcagacagcaggggcagcatcctgaaggagtcctcctctcccacgggccttgtccggctcaccaacaacctcattcaggtcatcgactgcagcatggctgtgcaggaggagcccaaggagccctatgtctcctccgtgctgccctggatcatcctccacaggatcatctggcaggaggaagacactttccggtctctgtgccaccagcagcagctccagaacccaacggaagaagggatctcggagatgcccatgctcccatcttccctcatgctgctcaacacagcacatgagtacctgggcaggaggtcctggtgctgcaattcagatggagcgctgctgcgattctatgtgcacgttctccaaaaggagcttgctgcgtctgcctctgaggacactcacccctacaaggaggagctggagaccgccttggagcagtgtttctactgcctctacagcttccccagcaagaagagcaaggccaggtacctggaggagcactcagcccagcaggtggacctcacctgggaggacgccctgttcatgtttgagtacttcaagcccaagaccctccctgagtttgacagctacaagaccagcaccgtctctgcggacttggcaaacctgttgaaaagaatcgccaccattgtgccgcgcacagagaagcccgccctgagcatggacaaagtctctgcctacattgagggaacctcagcggaggtgccctgccttcctgacggggcagaccccgcccctccagtgctgaatgagctctactacctcctggctgactatcacttcaaaaacaaagagcagtccaaagccatcaagttctacatgcatgacatttgcatctgccctaacaggtttgattcctgggcaggcatggctctggcccgggccagccgaattcaggacaagctgaactcaaatgagctgaagagtgatggacccatctggagacatgccacacctgttctgaactgcttccggagggcccttgagattgacagctctaacttgtccttgtggattgagtatggcaccatgtcctatgccttgcactcattcgcgtcccgtcagctgaagcagtggcgagccgagctgcctcctgaggttgtgcagcagatggaggatcggcgagacagcatgctggagacagccaggcactgtttcacgtctgcagcccactgcgagggtgatggcgatgaggaggagtggctcattcactacatgctgggcaaagtggcagagaagcagcagcagccgccgaccgtgtacctgctgcactaccgtcaggcgggccactacttacacgaggaggccgcccgctaccctaagaagattcactaccacaacccgcccgagctggccatggaagccctggaggtgtacttccggctccatgcgtccatcctgaagctcctgggcaaacctgactctggggttagcgcagaggtcctggtcagctttatgaaggaagcagcagaaggaccttttgccaggggcgaggagaagaatacacctaaagcttcagaaaaggagaaggcctgcctggtggatgaggactcccactcttcagctgggacactgccgggccccggagcctcccttccctcctcctctggcccaggtctgacatccccaccttacacagccactccgattgaccacgattacgtcaaatgtaaaaaaccccgtcagcaggcgacgccggacgaccgaagccaggacagcacagctgtggcactgtcagactccagctcaacacaggacttctttaatgagcccacaagtttgctggacggttctcgaaagctccttccagagaagaggatctctgggctcagtgctcaagcaggaccaagtggtaaagaccttccagggcccacagaggaaagaggaaaaacggaggagtctttggagagcacagaggccttccgggttgtagaaccaagcgtccagaagcctgtggcagattcctcggcctctgcttacatccccagcaagcccgcagtgtccacgccccctccgtgggatgggaagaagaggagtgaccccctaggggagccagtggctttccctcaggggctgccagcaggtgctgaggaacagcgccagttcctcacagagcagtgcatcgcctccttctgcctgtgcttgagtcgcttcccacagcactacaagagtctctaccggctggcctttctctacacctacagcaagactcaccggaacctccagtgggcccgtgatgtgttgctaggcagcagtatcccatggcaacaactgcagcacatgccggcacaggggctcttctgcgagaggaacaagaccaatttcttcaacggcatctggcggatccccgtggatgagattgaccggcccggcagcttcgcctggcacatgaaccgctccatcgtgctgctactcaaggttctagcccagctccgggaccacagcaccctgttgaaggtgtcctccatgctgcagcggacaccagaccagggcaagaaatatctgcgagatgctgaccgccaggtgctggcacagcgcgccttcatcctcactgtgaaggtgctggaggacacactgagtgagcttgcagaggggttagagcacccaggatccaaggcctgtggcctctctggagccaggatgaccaccgatgtctcacacaaagccagtcccgaggatggccaggaaagcctcccacaccccaagaagctacctctagctgatggctcaggaccagggcctgagccagggggcaaagtgggccctctccaccaattgccagtggccacagacacaagggacaacacagagcagggtggggagccgaaagacaaagagcgtcccccggtggggcccacagaacccatggacaccggcgagactgctgctcgccacccagacttggaaccgacgccacgtctgttgccaggccgccccccaagggaccggggtcccgagagccgctctgctgagctttccctggaggagctgagcatcagcacccggcagcagcctgccccacttgtaccatccccagtaacccccaccacagctgctcccactaccatgggggccagggcagcggggcaccccgaggaggcaccgccaaggcctaatcgaaagaggaaactcctgcaggacacagagtctggcaagacgctccttttggacgcctaccgtgtgtggcagcagggccagaaggccatggcctatgacctgagccgcatcgagaagatcatgtcggagacttacatgctcatcaagcaggtggacgaggagactgcactggagcaggctgtgaagttctgtcaggtccacctcggggctgctgcccagagacaggcctcaggagatgcacccactacccccaagcaccccaaggacagccgagagaatttcttccctgcaacagtggccccctcagcacctgacaccacagcacctgacgctctccagcggcccagtgactcccacctcaagcctgggttggctgctgccatcacctgccctccctcagcatcagcctctaccccagaccctggaattccccagccacacaggccagaggctgtgcccagcagggcccctctgagtcctgatggagaagaggtgtcaggagtgacagagggtcccagctttctatcccaagaaccacggcacagtcaccagatgaaaatggctgccactggtcccctggccgagcagcactgctggccagtggaggctgcttgccagacaggtgccgagcccaccttcagccaagccaccagcaccaaggtccccagcagtggaagtacccagacacctgagagccatcaaggcaaaactgagtccagcagagccaagtcccgcctcctgcccaacatgccaaagctggtgatcccctcggccaccaccaagttcccccctgagatcaccgtcacaccacctacccccaccctgctctcccccaaaggcagcatctcagaggagaccaagcagaagctgaagtctgccatcctgtctgcccaatctgccgccaatgtgaggaaggagagcctgtgccagccagccctggaggttctggagacatccagccaggagtcctcattggagagtgagacagacgaggacgatgactttatggacgtatgacgggttcacccagaggcagggcctggggtccctttggtccagaccctgggcaaggccagaagcctattgaggtatggttccctgtggtctcctaagcctgcccagccccctctttgcagcaccctgccctggctcaggctgtccagagcgtgctggtccagaggacggtacggcctgtcttaggcacatgcactgctgcggtctgcacagccgggatgctgccgccgccgccgcttctttttttaatgagatactgactttctctacaagcccgtgtgtactgaccaggcccacagtccagtgccgaggagacatcaggagcctagctctccccacaccctttttygtcattgttgcttctttttct

SEQ ID NO: 108 - DNA, 1544 bp, Rattus norvegicus
  misc_feature (1)..(1544): n = a or c or g or t
atcgcggaaattaccgatgcctgcgcagctccttccgctcagctccgcgtccgagcctcctggaacgatatttggagttcttaaaagatggcagacattgacaacaaagaacagtctgaacttgatcaagatttggaagatgttgaagaagtagaagaagaagaaacgggtgaagaaacaaaaatcaaagcacgtcagctaactgttcagatgatgcaaaatcctcagattcttgcagctcttcaggaaagacttgatggtctggtagacacaccaacaggatacattgaaagcttgcctaaggtagtcaaaagacgggtgaatgctctcaagaatcttcaagttaaatgtgcacagatagaagccaaattctatgaggaagttcatgaccttgagagaaagtatgctgttctctatcagcctctgtttgataagcgatttgagatcattaatgcaatttatgaacctacagaagaagaatgtgaatggaaaccagatgaggaagatgaagtttcggaggagctgaaagaaaaggccaagattgaagatgagaaaaaggatgaagaaaaagaagaccctaaaggaattcctgagttttggttgacagtttttaagaatgatttgctcagtgatatggttcaggaacatgacgaacctattctgaagcacttgaaagatattaaagtgaagttttcggacgctggccagcctatgagttttatcttagaatttcactttgaacccaacgaatatttcacaaatgaagtgttaacaaagacttacaggatgaggtcagaaccagatgattctgatcccttttcttttgatggaccagaaattatgggttgtacagggtgccagatagattggaaaaaaggaaagaatgttactttgaaaaccattaagaagaagcagaaacacaagggccgtgggacagttcgtactgtgactaaaacagtttccaagacttctttctttaacttttttgctcctcctgaagttcctgagaatggagatctggatgacgatgntgaggcaatactggctgcagactttgaaattggtcactttttacgtgagcgtataatcccaagatcagtgttatacttcactggagaagctattgaggacgatgacgatgactatgatgaagaaggtgaagaagctgatgaggaaggggaagaagaaggagatgaggaaaacgatccagactatgacccaaagaaggatcaaaacccagccgagtgcaagcagcagtgagcagtgactggccttgaggacggcctccctgtaatagcctaaacatgactcacttacttacagccttatggttttgtattttcttgatagaatcagtaagtttctaagggaaaggaaattgatattttgcagaccaatttgttctaaccagcatcccaactctagctctgtagccacgttaccgagtccagccctttactgcatgctcaggtcgctgcagtctggttctcctgagagatttcatcatgtagctattggtacattatgaaaccactgtgaacaat

SEQ ID NO: 109 - DNA, 3770 bp, Rattus norvegicus
cgcggaactgtgctcaggacctgagctgagaggattcgcccagtgtcagcggcgcgagctggtgaggagaggacgaggatactaggctgaaaaacactccacctccacttgccaatattgtttcagaatgtcaagtactgcgtcctaccggatcttcaattttgcaaggaatcgtattgctgtgttacgagggggtagacgcttgtactccagggcagccacgagtaggaatcaagtgaaatggaggctcttttctcccgcatcattggccgtgaacgacagttctccacatggtggctttgctctgcggaaagcttacagacacacatcaaccgaggaagaggatttccacttgcagctcagccccgaacaggtcagtgacctgctccgagctggcgagtcatcccacaaggttctggatttcaacagcggagttccaaattcagtgttaaggtttgagagcaaccagttggcggccaattccccagtggaagaccgacaaggtgtggcttcctgcgtgcagacgagggggacgatgtttggtatttttgatgggcatggtggccatgcgtgtgcacaggcggtgagcgagaggcttttctattacatggcggtgtccctcatgtcccataagaccttggagcagatggaggaagccatggagaacatgaagcctttgctgcccatcctgcagtggctcaagcaccccggagacagtatttataaagatatcacatcggttcatctggaccacctccgagtctattggcaggaactccttgacctacatatggaaacgggactaagcactgaagaggcattgatgtactccttccagagactggactccgacatctcgctagaaattcaggctcctctggaagatgaggtaacgaagaacttatccctccaggttgctttttctggggcgacagcctgcatggcccacgtcgacggagttcacctgcacatagcaaatgctggcgactgccgagctatcctgggtgtccagggagacaatggagcgtggtcatgtttacctcttacctgtgaccacaatgcctggaatgaggcagagctgtcccggcttaagagagaacaccccgagtctgaggacaggacactcatcatagatgacaggctgctgggtgtcctcctaccctgcagggccttcggggacgtccagctaaaatggagtaaagagttgcagcggaacgtcctagagaggggatttgataccgaggccctcaacatctaccagtttaccccgccccactaccacactccaccctacctgactgctaagcctgaggtcacataccacaggcttaggccccaagataagttcctcgtgctggcctcagatggcctctgggacatgctggacaatgaggatgtggtaaggctggtggtggggcacctgtccaaggtcggtcaccagaagccagccctggatcaaagaccagccaacctgggccacatgcagagtctgctgctgcagaggaaagccagcggactccatgcagctgaccagaatgcagccacacatctgatcagacatgccatcgggagcaacgagtatggggaaatggagccagagcgtctggctgccatgttgacgctgccagaggatgtggccaggatgtaccgggatgacatcactgtcatggtggtgttttttaactcagaatcaattgatacctattttaaggagggttaagagtctcaccctgttgccaaggctaactcgaatgccctttatttagaacatttccactcattccttagtgagcaatccaaaccttagtaaagaacaggcagacataggttgctgagtaattaacgaaaggtagggaaaaccatccttagtgcaaaaaaacaaaaaacaaaaaacaaaaaacaaaaaaacaaacaaacaaaaaaagacattaggagcgaattttgtcctgtgtgttggtcagctcttctatgcagcagacaaaataaagactaaaattggcttaggctcatgtagcccatgtcctttataaagactgttaaattgtgtcatcctgtgcttttaaaggataaatttaatcatgagtctaagaataaagaacttcaggatcttctgagacccagttgcaaattttatagaggtgatccttctgaactctcgttatgagcaacttcttggctctagttttttgtttgttttttttttaaactagggaagcctaggtttacaaagcaatcttcagggcacttttctatgttgtgttctaacttccctctgtgtgtgtgtgtgtgtgtgtgtgtgtgtgtgtgtgtgtgtgtgtttatatgaaacgactgtgataatactctggatagtctgtgctgtttgtgttttaatgctggttaaatttattttaaaactgaatctcaagcttgtaagcaggactgccagaagcatgtttgggacctcagctgaggatgagaggaactaggcctctggatcagctgaatttaattgtgcagctatcgttcccctccgttgagcctcacttctgaacctttgagccgcctggggaggtgatttctgtctaatccctaactcctggcatttttgcttagtcaacggttccccctaggcttagccacgggttattcataattttaggttccttttgattatagcctccaaacattctgattccctgtgacacaatcctacctctgctattctgcctggcctcatcctgatgttactggaaaaccttacctgttctttctatcatccaaaggttggaagaaagatgacgtggtaattgaggacatttaggcaggacggactttttcagtggtttgtggacttgagagttcagcctggatctagagaagtgaaagtaaggtcttatgaagagccaggagccgaggctttctctctgcatcttggaagggaggagggagacttatcagatgggccacctgcccctgcctgttgagttgccgtggctacgccccgaagactagaccatatttagtgtgatagttgggtgaaagttaaaatgcatctggctatagtcctcatgggtcgttggtgtctgcttaaaaactaatccatacaaatcggtttcaggggatacgtttcctcttctcttggttggctgtggcattgaactgcaggaaatgtgtccctaaatggaaacacactttatttttggccattttaatttcctgtcccttgtcagtgccgtaggcaaagctctttagttgatcctttctgttgcttatccactgtgccatccacacactaggtttggcccccttggctttgcaggttagacgttctgccaagttcagactgggttagcaaaactggttagctcagtgggtaaaggctgccagtctcaaaatcccgagttccatccgtgggacttgcgtgatgaaaggagttgaaagatgtcactgacctccacatgtgcactgaggcacatgaactcacacacacaaaaaagaaatcagagccaggcagtgatggtgcatgcctttaatgccagcactcaggaggctgaggcaggtgaatctcttgagtttgaggtcagcctggtctacagagttccaggacagccaggacaatacagagaaaccctgccttgacctccagtccccaccagaaaaaacaaacaaacaaacaaacaaacaaacaaacaaaaaaaccaaaatgagaatcgttttttgtacatttcccagtgtacctgtttagtgataatggttttatgtttaaaaaaaaaaaaaaaaaaaaaaaa

SEQ ID NO: 110 - DNA, 7396 bp, Rattus norvegicus
  misc_feature (1)..(7396): n = a or c or g or t
acagccatccatccaagagttcatgaatagtttaacaaaggaagggcagagctattgagtaatccaggctcattaattgtgtacttgccagggggatctgactttaaatcattaatgcaggcaacatttctctccagagccatcaatgtgattgtgctgctagaaaaaatgtaataatgatggattttcatttctctttccttttccttctcattggaacttcagagtcacaggttgatgtttccagttcttttgatggcactgggtatgatataacgctatcttcagtttctgccacgacctacagctcgcctgtgagtagaacactggcaacaaatgtgacaaaaccggggcctccagtcttcctagccggggagagagttggctctgctgggatactcctttcgtggaatacccctcctaacccaaatggaagaatcatatcttatgttgttaagtacaaggaagtctgtccatggatgcagacagcatatacccgagcgagagcgaagccagacagtctggaggttcttctcactaaccttaatcctggaacaacatatgagattaaggttgctgctgaaaacaatgctggcatcggagtgtttagtgacccatttctttttcaaactgcagaaagtgctccgggtaaagtagttaacctcacagtggaagctctcaactactctgcagtaaacttgatttggtatttacctcggcaaccaaatggcaaaatcaccagcttcaagatcagcgtcaagcacgccagaagtggcatagtagtcaaggatgtctccctcagagtagaggacattttgtctgggaaattacctgaatgtaatgagaacagcgaatctttcttgtggagtaccaccagcccctctccaaccctgggtagagtgacacctacagttcgcaccacacagtcatccagcacggcggcacggagtaagatcagctctgtgtggaaggagcccatcagttttgtggtgactcacttgagaccttacacaacgtatctctttgaagtctcagccgttaccacggaagcaggatatattgacagcaccattgttaggacgccagaatcagtgcctgaaggaccaccccaaaactgtataatggggaatgtcacaggaaaggccttttcaatttcctgggacccaccaactattgtcacaggaaagtttagttacagagttgaattgtatgggccatcagggcggattttggataatagcacgaaagacctccggtttgcgtttacacatctcacaccattcacaatgtacgatgtctatgttgctgcggaaaccagtgctggggttggacccaagtcaaatctttcagtatttactcccccagatgttccaggagcagtgtttgatttacagatcgcagaggtagaagccacagaaataagaattacttggaggaaacctcgacaaccaaacggaatcatcagccagtaccgtgtgaaagtgtcagtcctagagacaggagtagttttggaaaatactctgctcacaggacaagatgagtctataagcaaccccatgtctccagaaataatgaacctagtagaccccatgataggattctatgagggctcaggagaaatgtcttcggacctgcactccccggcttcattcatatacaacagccatccacacaatgactttcctgccagcactagagctgaagagcaaagttcaccagttgtaaccaccaggaatcagtatatgaccgacatcactgccgaacagctgtcttacgttgtcaggcggcttgtaccattcactgagcacacgattagcgtatctgctttcaccatcatgggcgaaggaccaccaacggtcctnactgttaggacacgtgagcaagtgccaagctctatccaaattataaactataaaaatattagttcttcatctattttactgtattgggatcctccagaatatcccaatggaaagatcactcattacacaatctacgcaacggagctggacacaaacagagcattccagatgaccactgtagataacagctttctcatcacagggttgaagaaatatacaagatacaaaatgagggttgctgcctcaactcatgttggggaaagttctttgtcagaagaaaatgacatctttgtgagaactccagaagatgagccagaatcatcacctcaagatgtccaagtaactggtgtgtctccaagtgaactgagattgaagtggtccccgcctgaaaaacctaacgggatcattattgcctatgaggtgctttaccaaaatgcagacaccttgtttgtaaaaaacacctcaaccacagacatcattataagtgacctgaaaccttacacactctataatatttctatccggtcgtataccagacttggccatggcaatcagtcatcctcattgctgtctgtaaggacttcagagactgtgcctgatagtgcaccagaaaatattacttacaaaaacatttcttcaggagagattgagatatccttccttcccccaaggagtcccaacggcatcatacaaaaatacacaatttacctcaagagaagtaatagccatgaggcaagaactataaatacaacctctttgactcaaaccattggaggactgaaaaagtatacccattatgtaatcgaggtgtctgctagtacactcaaaggtgaaggcattcggagtaggccaataagcatattgaccgaggaagacgctcctgattctcctcctcagaacttctctgtgaaacagttgtctggtgtcaccgtgatgttgtcatggcaaccacccttggagccaaatggaattatcctctattacacagtttatgtctgggataaatcatctctaagagctattaatgcaactgaagcatcactggtgttgtctgacttagactataatgttgactacggtgcctgtgtaacagctagcaccagatttggcgatgggaacgcaagaagcagcatcattaactttcgaacaccagagggagagcccagtgatcctcccaacgatgtccactatgtgaatctcagttcctcatcgataattctcttttggactcctcctgtaaaacctaatggaatcatacaatattattctgtttattatcaaaatacttcaggtacttttgtgcagaactttacacttcttcaagtaaccaaggagtctgacaatgtgacagtgtctgcaaggatatacagactggcaatattcagctactatacattttggctaacagcaagtacttcagtcggaaatgggaataaaagcagtgacataattcatgtatacacagaccaagacatacctgaaggtcctgttggaaacctgacttttgagtccatttcatcaactgcaattcatgtgagctgggagccaccatcccaaccaaatggcctggtcttctactacctttcactgaatttacagcaaagtcccccacggcacatgataccacctctggttacctatgaaaacagcatagactttgatgatctggaaaaatatactgactatatatttaaaatcactccgtcaacagaaaagggattctctgagacctatactacccaactacacatcaaaacggaagaagacgttccagacactccaccaataatcaacacttttaaaaatctttcttctacctccattctcttatcatgggatcccccattaaagccaaacggtgcaatactaggttaccatttaactttacaaggaccccacgccaaccatactttcgtcacttccggtaaccacatagtactggaagaactctcgccatttaccttatatagtttttttgctgctgcaagaacaatgaaaggactcggtccttccagtattcttttcttttacacagatgagtcagcgcctttagcacctccccagaatttgactttaatcaactacacttcagattttgtatggctgacatggagcccaagtcctcttcctggcggtattgtaaaagtatatagttttaaaattcatgagcatgagactgatactgtattttataagaatatttcaggtcttcagactgatgccaaacttgagggactggagcctgttagcacctactcagtcagtgtgtctgcatttaccaaagttggaaatggcaatcagtatagtaatgtggtggaatttacaacccaggagtctgttccagaggctgtacggaatatagagtgcgtggcacgtgactggcagtcagtatcggtgaggtgggacccaccgagaaaaacaaatggaataattattcactatatgataacggttggagggaattctaccaaagtctcccccagagaccccacgtacacgttcacaaaacttcttcccaatacgtcatacgtctttgaagtaagagcgtcaacatcagccggcgaaggcaatgaaagcaggtgtgacatcagcacactcccggagacagttcccagtgctcccacaaatgtagcgttttctaatgtccagtcaactagtgcaacactaacatggacaaaacctgatactatctttggatacttccaaaattacaagataactactcaacttcgtgctcagaagtgcagagaatgggaacctgaagaatgtattgaacatcagaaagatcaatacctctatgaagcaaaccaaacagaagaaacagtgcatgggttaaagaagtttcgatggtatagattccaagtggctgctagcaccaatgttgggtacagtaatgcctcggaatggatttctacacaaacgctgcccggccctcctgacggtcctcctgaaaatgtgcacgtggtcgcaacatcaccctttggtatcaatatcagctggagtgaacctgctgtcataactggaccaacattctacctgattgatgtcaaatcggtagatgatgatgactttaatatttccttcctgaaatcaaatgaagaaaacaaaaccacagagattaacaacttagaagtatttacaaggtattctgtggtgatcacagcctttgtaggaaatgttagtcgggcatacacagatgggaagtcaagtgcagaagtgataattacgactttagaatcagtgcccaaggacccacctaataatatgacatttcagaagataccagatgaagtaacaaagtttcaattgacattccttccaccttctcagcccaatggaaacatccgagtgtaccaagcactggtttaccgggaagacgatcctactgctgtccagattcataacttcagcattatccagaagacggacacctccatcattgcaatgctagaaggcttgaagggtggacatacatacaacatcagtgtttacgctatcaacagtgctggtgctgggccaaaggtgcagatgcgaataactatggatattaaagctccagcacgaccaaaatccaagccaattcctatccgtgacgccacaggaaaactgcttgtgacgtcaacaactatcacaatcagaatgccaatatgctactacaatgatgaccacgggccaatcagaaatgtacaagtccttgtggcagaaacaggagctcagcaagacggaaatgtgacaaagtggtacgatgcatattttaacaaagcaaggccatattttacaaacgaaggattccctaatcccccgtgtatagagggaaagacaaagttcagcggcaatgaagaaatctatgtgataggtgccgataacgcctgtatgatccctggaaatgaagagaaaatttgcaatggacctctgaaacccaaaaagcagtatttgtttaaatttagagccacaaatgtcatgggacaatttactgactctgagtactctgaccctattaaaactttaggtgaaggcctttcagaaagaactgtggagatcatactgtcagtcactttgtgtatcctctcaataatcctccttggaacagctatttttgcatttgtaagaattagacagaaacagaaggaaggtggtacatactctccccgggacgcagagattatcgacactaaattcaagctggatcagctcatcacggtggcagacttggaactgaaggatgagagattaacgcggttacttagttataggaaatccatcaagccaataagcaagaaatccttcctgcaacacgttgaagagctttgcacaaacagcaacctaaagtttcaagaggaattttcggaattaccaaaatttcttcaagatctctcctcaactgatgctgatctcccttggaacagagcaaagaatcgctttccgaacataaaaccatacaataataacagagtgaagctgatagccgacgtaagcctcccgggatcggattacattaatgccagctatgtctctggatacttatgtccaaatgagtttattgctacccaaggcccattgccagggacagtcggagatttttggagaatggtttgggaaaccagaacgaaaacattagtaatgctcacacagtgttttgagaaaggacggatcagatgccatcagtattggccagaggacaacaagccagtgacagtctttggagacatagtaattacaaagcttatggaggacattcagatcgactggaccatcagggatctgaaaattgaaaggcatggagactgcatgactgtccggcagtgtaacttcactggttggcctgagcatggggttcctgaaaacaccacccctttgattcactttgtgaagttggtgcgaacaagcagagcacatgacaccacccctatggttgtgcattgcagcgctggggttggaagaacaggagttttcattgctctggaccacttaacacagcacataaataaccatgactttgtggacatatatggactagtagctgaactgaggagcgagagaatgtgcatggtgcagaacctggcacagtacatcttcttacaccagtgcattctggatcttttatcaaataaaggaggtcatcagcccgtctgttttgttaactactccacacttcagaagatggactctttggatgccatggaaggtgatgttgagcttgaatgggaagaaactaccatgtaaaatttggaccaaagattacaacaggaggatagaattttcagatcccaggagccaacattatccctcttgcttctgaattggactgggcaaaggaaatctttatgcttcccggaccatgcctcactgactgggctgactgttttatggacggatggttgtaggaaaatgctcatataagatagtcatttgttttatatagaattaaatattatgtaattaaaatgtttaagaaaatacatcatacaaattttcgaggtcctcaagtcttcttgaaataagccaaatataaaattatgattatttcatagcgt

SEQ ID NO: 111 - DNA, 1740 bp, Rattus norvegicus
gtgtcatggcggctctcggaggcccgcatgtgtactgtggtgggtttgaggcacggggcggctccaggctgcgttttcggtcgcggggagaggacccaggctttctgggcagatgccccgagtctgcactcacctgcttcccgtcttgctccgccgctctcccaggagattcacctccagactccgaagcggaaagccggtgtggcggcccttaggccattcaccgggtgtcgttttcccggtgtgaggccggttcagccagttgcatctcgtcttcctgggcctgtttgaaactttagtgacatggcagaacaggatgtggaaaatgagcttttggattatgatgaagatgaagagccccaggtaccccaggagagcactccagctcccccgaagaaagatgtcaaaggatcttatgtctccatccacagttctggcttccgggactttctgctgaagccggagctcctgagagctatagttgactgtggctttgaacatccttcagaggtccagcatgaatgtattccccaggccattctgggtatggatgtcctgtgccaagccaagtctgggatgggcaagacagctgtgtttgtgctggccaccctgcagcagattgaacccatcaatggccaggtatcagtactggtcatgtgccacacaagggagctggccttccagatcagcaaggagtatgagcgcttctcgaagtacatgcccagtgtcaaggtatctgtgttctttggaggcctctccattaagaaagatgaagatgtgttaaagaagaactgtccccatgttgtggtggggacaccaggccggatcctggccctcgtgcggagcaggagcctcaacctgaggaatgtgaagcactttgtgctagatgaatgtgacaagatgctggaacagctggacatgcgccgggatgtacaggagatctttcgtctgacaccccatgagaagcaatgtatgatgttcagcgccaccctgagcaaggagatccggccagtctgcaggaagttcatgcaggatcctatggaggtgtttgtggacgacgagaccaagctcacactgcatgggctgcagcagtattacgtcaaactcaaggacagtgagaagaatcgtaaactcttcgacctccttgacgtgctagagtttaaccaggtggtgatctttgtcaagtctgtgcagcgctgcatggccctggcccagctcctagtggaacagaattttccggctatcgctattcacagaggcatggcccaggaggagcgcctgtcccgataccagcagttcaaggacttccagcgtcgcatcctagtggctactaatctgtttggcagaggcatggacattgagagagtcaacatcgtcttcaactatgacatgccagaggactcggatacctacctgcaccgagtggctcgtgctggtcgctttggtaccaagggtctggcagtcacttttgtgtcagatgagaatgatgccaaaatccttaatgacgttcaggaccggtttgaagtgaatgtggctgagcttccagaagaaatagatatctccacatacattgagcagagccggtaaccatgtgtgtagccaggcacatggctttctctcctgctgcttcagatcctcctcctaggtggcaatcggcggcctctctttttattgttccaaagctttagctatgttaagaataaacttttattgtgaaaaaaaaaaaaaaaaaaaaaaaaa

SEQ ID NO: 112 - DNA, 4036 bp, Rattus norvegicus
ctggagcttgcacacacagacagcacaccccaccctttaaggaagtaaagaggagagcagcaggggtgtggttaacgaccgaaaggaggaggtgggtggggggaaaacaacctgtcagcctcttactcagcctctgccggctgagccttgcgtcctacctgctggcggctgcactcaccttgcccagcccggagccctggcccgagtccgcgcctcgcccgagggactgcaatgtgctggtcctagctgcagtctgagaggatgtccggggtgtctgagcccctgagccgtgtaaaagtgggcactttgcgcccgcccgagggccccccagagcccatggtagtggtaccagtagacgtggagaaggaagacgtgcgtatcctcaaggtctgcttctacagcaacagcttcaacccagggaagaacttcaagcttgtcaaatgcacagtgcagacagagatccaggagatcatcacctccatcctcctgagtgggcgaatagggcccaacatccagctggctgaatgctatgggctgaggctgaagcacatgaagtcagatgagatccactggctgcacccacagatgactgtgggcgaagtgcaggacaagtatgaatgtctacacgtggaggctgagtggaggtatgaccttcaaatccgctatttgccagaagacttcatggagagcctgaaagaagacaggactacactgctgtacttttatcaacagctccggaatgactacatgcaacgctatgccagcaaggtcagtgaaggcatggctctgcagctgggctgtctggagctcaggagattcttcaaggacatgccccacaatgcacttgacaaaaagtccaactttgaactcctggcaaaagaagtcggtctggacctgtttttcccaaagcaaatgcaggaaaacttaaagcccaagcagttccggaagatgatccagcagaccttccagcagtatgcatcactccgggaggaagagtgtgtcatgaaattcttcaatactctggcaggctttgccaacatcgaccaggagacctatcgctgtgaactcattcaagggtggaacattactgtggacctggtcattggccctaaaggcatccgtcagctgacaagtcaagacacaaagcccacctgcctcgccgagttcaagcagatcagatccatcaggtgcctccccttggaagagacccaggcagtactgcagctgggcatcgagggtgccccccagtccttgtccatcaaaacctcgtccctggcagaggctgagaacatggctgacctcatagatggctactgcaggcttcaaggagagcataaaggctctctcatcattcatgccaagaaagatggtgagaagaggaacagcctgcctcagatccccacactaaacctggagtctcggcggtcccacctctcagaaagctgtagcatagagtcagacatctatgcagagattcctgatgagaccctgcgaaggccaggaggcccacagtatggtgttgcccgtgaagatgtagttcttaaccgcattctgggtgaaggcttcttcggggaggtctacgaaggtgtctacacgaaccataaaggggaaaaaattaatgtggccgtcaagacctgtaagaaagattgtaccctggacaacaaggagaagttcatgagtgaggcagtgatcatgaagaatcttgaccaccctcacatcgtcaagctgattggcatcattgaagaggaacccacatggatcgtcatggaactgtatccttatggggagctgggacactacctggagcgaaataaaaattccctgaaggtacccactctggtcctgtacgctctgcagatatgcaaagccatggcctatctggagagcatcaactgtgtccacagggatattgctgtccggaacatcctggtggcctctcctgagtgtgtgaagctcggggactttgggctctcccggtacattgaggatgaggactattacaaagcttccgtgacccgtctccccatcaaatggatgtcccccgagtccatcaactttcgccgctttacaaccgccagtgacgtctggatgtttgctgtatgcatgtgggagatcctcagctttgggaagcagcctttcttctggcttgaaaacaaggatgtcatcggggtgctggagaaaggggacaggctgcctaagcccgaactctgcccgcctgtcctttacacactcatgacccgctgctgggactatgaccccagcgaccggccccgctttacggagcttgtgtgcagtctcagtgacatttatcagatggagagggacattgcaatagaacaagaaaggaacgctcgttaccgaccccccaaaatattggagcccactgcttttcaggaacccccacccaagcccagccggcccaagtacaaacaccctccacagaccaatctgctggctcctaagctgcagttccaggtccctgagggtctgtgtgccagctctcctacacttacgagccctatggagtatccatctccagttaactcgctgcacaccccgcctctgcaccgacacaatgtcttcaagcgccacagcatgcgggaggaggacttcatccggcccagtagtcgagaagaggcccagcagctctgggaggcagagaagatcaagatgaggcaggtcctagacagacagcagaagcaaatggtggaagattcccagtggctgaggcgggaggaaagatgcttggacccgatggtttatatgaatgacaagtccccactgaccccagagaaggaggccggctacacggagttcacagggcccccccagaagccaccacggctcggtgcacagtccatccagcctacagccaacttggacaggactgatgacctcgtgtaccacaatgtcatgaccctggtggaggccgtgctggaactcaagaacaagctcagccagctgcctcctgaggagtatgtggtggtggtgaagaatgtggggctgaacctgcggaagctcatcggtagcgtggacgatctcctaccctccttgccagcatcttctagaacagagattgaagggacccagaaactgctcaacaaagacctggcagagctcatcaacaagatgaggttggctcagcagaacgctgtgacatccctaagtgaggactgcaagcggcagatgctcacagcatcccataccctggctgtggatgccaagaacctcctggatgctgtagaccaagccaaggttgtggctaatctggcccacccgcctgcagagtgatcaagggagggaccacctgcctgcatcttctgccccaacctttcctgccttgcctttggttattggtcttctagggaaagctgagaagagtcctccccttaccactttgcacgacccccctttccccaacccaccccagactgtgctacttgggctacatctggacagaaaggactctgggcacagacacggggtggggtgacatagtcataggggtacttctgccagccattccctcctaccccagcctgggttgctggagcatcattggggtcataactgtacccctaccagccaagatggctttctgcatggacatttgagagccagtatttctctgtcctctttagccctcagggacccctgatacagaggggacagagaggggttttatttgtagagaagctggtgagatgagagctgggcatggctctcttgtacagtgtacattggaatttatttaatgtgagtttggcctggacagacagccatgggccacagtccaggaacaagctaatccagccacagggaagaagcagagtcaggggtcagaatgggacttcatgtcctccctgcgtttctcttctccctctttcctcctcccctcttttcttagtcctcctttttctcttcccccttttcacatctgttcctttcctctctcacatttgtggagaacatccatttaccttttctctttttgatctgtggttgaattaaaatcattagcattcgctttgtggtt

SEQ ID NO: 113 - DNA, 2640 bp, Rattus norvegicus
gaattccgccgggcagggcgcacgtggtgggcgccccctgcgggaagcggggcgctggggagccccggccgcgggctcgggcgcgcagagccggggccatgtggacgggcggccggcggccgggccggcttcgccgggcggcctctgccgcagacatggagaaactcagtgcgctgcaggaacagaagggcgagctgcgcaagcgcctgtcctacaccacgcacaagttggagaagctggagacggagtttgactccacccgccactatctggagattgagctgaggcgcgcacaggaggagctggacaaggtcaccgagaaactgcgcaggattcagagcaactacatggcactccagaggatcaaccaagagctggaagacaagctgtaccggatgggccagcactatgaggaagagaagcgtgccatgagccacgagattgtcgccctcaacagccacctgctggaggctaaggtgaccattgacaagctgtcagaagacaacgagctctataggaaggactgcaatctagcggcccagctgctgcagtgcagccagacctacggcagggtccataaggtgtccgagctgccctcggacttccagcagcgtgtgagcctgcatatggagaagcatggctgcagcctgccgtccccactgtgccatccgtcctacgccgacagcgtgcccacctgcgtcatcgccaaggtgctggagaagcccgaccctggcagcctgtcctcgcgcatgtcggatgcctcggcccgcgacctggcctaccgcgacggagtggagaacccgggcccgcgacccccgtacaagggagacatctactgcagcgacacggctctctactgccctgacgagcgagatcacgaccggcggcccagcgtggacacgccggtgaccgacgtgggcttcctgcgtgcgcagaattccaccgacagcctggcggaagaggaggaggccgaggcggcggccttcccggaggcctaccgtcgcgaggccttccagggctacgcggcctcgctgcccacgtccagctcctactccagcttcagcgccacgtccgaggagaaggagcacgcgcaggccagcacgctgaccgcctcgcagcaggccatctacctgaacagccgcgaagagctcttcagccgcaagccgccctccgccacctacggcagcagccctcgctacgccaaggccgcggccaccctgggctccccgctcgaggcccaggtagccccaggcttcgctcggactgtgtctccgtacccggccgagccctaccgctatccggcctcccagcaggctctcatgcctcccaacctgtggagcctgcgggccaagccgagcggtaaccggcttgccgcccgggaggacattcgaggccagtggcggcccctgagcgtggaggatgtgggcgcctactcttaccaggccggcgctgcaggccgcgccgcctcgccctgcaacttctcagaacgtttctacggcggcggtggcggcggcggcagcccgggcaagaatgccgagggccgtgccagccccctctatgccagctacaaagccgatagtttctcggagggcgatgacctctcccagggtcatctggccgagccctgcttcctccgagcgggtggtgatctgagcctcagccccagccgttcagctgatcctctccctggctatgccaccagtgacggggatggggataggctcggggtgcagctgtgtgggcctggcagtagcccggagcccgagcacggctcccgggattccctggagcctagctccatggaggcctctcccgaaatgcaccctccaacccgcctcagcccccagcaggccttcccaaggactggaggctctgggctgagccgcaaggacagtctcactaaggcccagctctacggaaccctgctcaactgactgccatcagcaggctgcagtcaggggctccctaccaccctgccccatatagggagtagctaaccccctcgtcccaacccctgctaaggaactccagttccagttccagttcctgttccagttccagttcctgttccagttcctgttccagttccagttcccgttcctgttccagttcctgttccagttccagttcccgttccagttcccgttcctgttccagttcccgttccagttcctgttccagttccagttcctcctgaccctgttactaacaccccagtagaacctgaaaagaccccctctgccaatcgtcttgtccaccccagcctctgctgcaaaccctacccagaatatttccgctctgcacccttccctgaagtgagcatcccctgttttataagtgaagctatttttttagggaaaaagagcgtttgttcacgcacttgctgccaacttctggatggcagccttggcgtaccccacacgaagttccttcatttccagtgagggtgcttggggcctgccccagggaaggggaggctggggccctagagggaccagtctccacaagtagggagaagccagcaacaagggaattctgaagttctgaacactgaggaggggaaccaaagccacttagggcgcagaaaatgtcttatgctcgctcccgtgtcacagtgcagccagcctcgtgccgaattcc

SEQ ID NO: 114 - DNA, 2754 bp, Rattus norvegicus
agacagcaagtctaagtctggaggttccactgattcggacctggctgcagagaggttcacctattccctgcagtcatggctgtccaccgtggctctgcacgagctgctcccgcctcagataaagtacagaaaaacaagcctgcacagacatcggggctggaacagggcagccgaatggcgagaatttttgggtttgaatgggcagatttatccagctggcagagtgtcgtgaccctacttaaccgaccaacggaccctgcaaacctggctgtcttccgttttctctttgcattcttgatgctgctggacatcccccaggaacggggccttagctccctggaccgaaaatacttggatgggctggatgtgtgccgcttccccttgctggatgccttgcgcccactgccacttgactggatgtatctcgtctacaccatcatgtttctgggggcactgggcatgatgctgggcctgtggtaccggctaagctgtatgttattcctgctaccatactggtacgtgtttctcctggacaagacatcgtggaacaatcactcctatctgtatggtttgttggcctttcagttgacattcatggatgcaaaccactactggtctgtggatggcctgctgagtgcccaaaagaagaatgctcacgtgcccctttggaactacacagtcctgcgtggccagatcttcattgtgtatttcattgcgggtgtgaaaaagctggatgctgactgggttgagggctactccatggagcatttgtcccggcactggctttttagtcccttcaagctagtgttgtcggaggagctgacaagcctgctggtggtacactggtgtgggcttctccttgacctctcggctggcttcctgctcttcttcgatgcctccagacccattggcctcgtcttcgtgtcctactttcactgcatgaactcgcagctcttcagtataggtatgttcccctatgtcatgctggccagcagccctctcttctgctcagctgaatggcctcggaagctggtagcccgatgcccgaaaaggctgcaagagctgctgcctgccaaagctgctcctcggcctagtgcttcctgtgtgtataagagggcccgggcgaaagctggtcaaaagccaggcctacgccaccatctgggaactgtcttcaccctgctctaccttctggagcagctcttcctgccctattcccatttcctcacgcagggttacaacaactggacgaatgggctgtatggctattcctgggacatgatggtgcactcccgctcccaccagcatgtaaagatcacctaccgtgatggcctcactggagagctgggctaccttaaccctggggtattcacacagagccggcgctggaaggaccatgcagacatgctgaagcaatatgccacttgcctgagcctcctgcttcccaagtacaatgtcactgagccccagatctactttgatatctgggtctccatcaatgaccgcttccagcagaggctttttgaccctcgcgtggacatcgtgcaggccgtgtggtcccccttccggcgcacgccttgggtgcagccactcttgatggacttatctccctggaggaccaagttacaagacattaagagcagtctggacaaccacactgaggtggtcttcattgcagatttccctgggcttcacttggagaattttgtgagtgaagacctgggcaacaccagcatccagctgctgcagggagaagtcactgtggaattggtggcagaacagaaaaaccagactcttcgagaaggagagaaaatgcagttgcctgctggagagtaccataaagtctatactgtatcatctagtccttcctgctacatgtacatctatgtcaacactacagaggtcgcactggagcaagacctagcatatctgcaagaattaaaggagaaggtggagaacggaagtgaaacagggcccctgcctccagaacttcagcctcttttggaaggggaagtaaaagggggccctgagccaacacctctggtccaaacctttctgagacggcagaggaagctccaagaaattgaacgaaggcgaaatagccctttgcatgagcgcttcctccgctttgtgctgcggaagctgtatgtctttcgacgcagcttcctgatgactcgaatttcacttcgaaacctgctatttggccgcccttccctagagcaattagcccaagaggtgacatatgcaaacttgcgaccatttgaaccagttgatgagtcaagtgcttcaaacacagattcttccgatcctcatccttcagagccagattctgagcatgttcactctgagctctgaggagtccagatgctgtgcagctacgggggaaggctgttacaggcttattgtctgtgcaaaggacagtttttgggagagaaatgattttgagagaggctttcacagtacagcccaggctggcctcaagctcatggtggtccctgtttcagcctgttttgtcattacatatatatctccagacttagttgtttttccctttacattttacccccttttaagttctttaaaattatagcttacaggatccaaggtaaaagagaagaatttgaatcccaagatttgaggtgcttttagtttttatacaggatttctctgtgtagacaagactggccttgctgacagatttaccagcctctgcctcctgggattaaaggaatgggacatcaaaaaaaaaaaaaaaaa

SEQ ID NO: 115 - DNA, 2939 bp, Rattus norvegicus
ggatccccgcagccgctggacgcacggagccccttcgctggccggtagcttacgctcgcgccggccgccccctcctccctctcgaccgcccctcctccgtcccgcccccgcgcggagtccccagcgctgcagaggccgccgcctgcactgccactccatgagccgccgctctcccggacacgcttgcagaggggagcagggagccggccccggcccttctttccttgtgactccgcagccaccgccggagtcggttccctcacaccaacgttcccattgggaccttcacggcccggtgacctctgtcctgctctacctgcagcactgctcccctgcagcccctctgccgcgggaacttgggcaggaccgacgggactggcacacggggctggctcgggcgctgcggcgatgcccgcgggctctctcccctccacttgctcgccctgtgcctgggctcgggccccgacctgcgccgtgagatgactttccgcgacatcctgagcgtcactttcgaaggaccccggtcgagcagtagcactgggggctccggcgcgggcggcggagctggcacggttggccccgagggtggggcggtgggcggcgtgccgggcgctacaggcggcggcgctgtggtgggaaccggcagcggcgaggacaaccagagctccacgggagaaccgggagccgcggcgagcggcgaagtaaatggctcggcggccgtcggggggctagtggtgagtgctcagggcgtgggagtgggtgtcttcctggcggccttcatcctcaccgctgtggcgggcaacctgctggtcatcctttcggtggcctgcaaccgccacctacagacggtcaccaactatttcatcgtgaacctggcggtggctgacctgcttttgagtgcagctgtgttgcccttctcagccactatggaggttctaggcttctgggccttcggccgaaccttctgcgacgtgtgggccgcggtggacgtgctgtgctgcactgcctccatccttagcctctgcaccatctctgtggaccggtacgtgggtgtgcgccactcgctcaagtacccagccattatgacagagcgcaaggccgctgccattctggctctgctttgggcggtggccctggtggtatctgtgggaccgctactaggttggaaggagccagtgcccccggatgagcgtttctgcggcatcaccgaggaggtgggctatgcaatcttctcttccgtgtgctccttctacctacccatggcagtgatcgtggtcatgtactgccgcgtgtacgtggtcgcacgcagcactacgcgcagcctcgaggcaggcatcaagagggagcccggcaaggcctccgaggtggttctgaggatccactgtcgcggcgcagcgaccagcgccaaaggatatcccggaacacagagtagcaagggccacaccttgcgcagctcgctttccgtgaggctgctcaagttttcccgcgagaaaaaggctgccaagacgttggccatcgtcgtgggtgtcttcgtcctgtgctggttccccttcttcttcgtcctgcctctgggctctctgttcccgcagctgaaaccgtcagagggtgtcttcaaggtcatcttctggctgggctacttcaatagctgtgtgaacccgctcatctacccctgctccagtcgcgagttcaagcgcgccttcctccgcctcctgcgctgccagtgtcgccgccgccgccgccgcctctgggcagtctacggccaccactggcgagcctcgaccggcgacgcgcgttccgactgcgcccccagccctcgcatcgctccccccggggcccctctagccctcactgcacacccgggtgcgggctcggcagacacgccggagacgcaggattcggtctccagcagtcgaaagccagcctccgccctccgggagtggagactgctcgggccgctacagagacccacgacccagctgcgtgcgaaggtgtccagcctgtcccataagattcgctctggggcccggcgcgcggagactgcgtgtgccctgcgctccgaggtagaagcagtgtccctaaatgttccccaagatggggcagaagctgtcatctgccaggcttatgagccgggcgactacagcaacctccgagagactgacatttaaggaccgaaactcaggctggggaaggtgctggggaaagtgcgggggccaggggtggggtgctttatgggatactgcttcggatccaagactgcccagggtggctgctccatctcacccagagcaaccggagctggacctgggggtcggagcacttcgaaggtgatgggttatggtgccgcctgctggacatagttgtccagagctcttcctgaaagggaaaggctacaggattcgcccttctcatccagtctaagaaactacttagtcaactcctagtgtctaagcagaaggcttcagctatggcttctccccttgggaggaagaggaagaggtacaaattcttgttttgctgctcccagggaaaagatccgtggacagtttctactccttactgccacctggaggaagtcaatggacctaccataggacctgccatccggcaagttttggtggcgtattggatgcccgccgaacaaatctgttgctcttccgctctgggcccactgccctcttccccacactcctaactgtatgttcccctcaccataccccccgccccgggccttactgtttacactgtgtacatagttcattgtgcctgtctgtgcccatcacttctcactgggattccaggctgccaaaggggagagccttatttatcattttgaaacctatttattggtaagagtacttatattttgttcagactgtgcaaactgtccatctttggcttgtaatgcatatagagcctccttcttctgaaatccttagacc

SEQ ID NO: 116 - DNA, 2465 bp, Rattus norvegicus
gaacttgcaggcgagctgccccgagcctttctgggtgaagaactcaaggcgcgcgggcgcagcagctgcgagcattaggtgctgaggaccggcgccggaaccgggatcagccgcgagctgcgcatcctccctcctctccagctctgtcccgcactcgccgcatccttccccaggccaccgcgcttcctatgtgatctgccggggcaacgcggagcccattctcacagctcagcagtgaatctcccccccaaactgcagtaagccgcctttcaaggacaagatgttgataaatatgaacggcatcctatggatgtgctcaaccttactgttaacgcatgcactgcataaagccaaaatggaagaaaacccacctgttaaaggctctctgtctggaaaagtgatcctaccttgtcatttttcaaccttgcccaccttaccacccgattacaacacgagtgaatttctcagaatcaaatggtctaaaatagaagtggacaaaaatggaaaagacataaaggagactactgtcctggtggcccaagacgggaacatcaagattggtcaggactacaaggggcgggtatcagtgcctacgcatcccgatgacgtaggcgatgcctctctcaccatggtcaaactccgtgctagtgacgcaggtgtctaccgctgtgatgtcatgtatggcattgaagacactcagaacacgatgtcgctggccgtggacggtgtcgtgtttcactacagggcagcgaccagcagatacactctgaacttcgagtctgctcaacaggcttgtttggacatcggggcggtcatagcaaccccagagcagctgttcgctgcctatgaggatggatttgagcagtgtgatgcaggatggctgtctgaccaaactgtcagatatcccatacgggctccccgagagggctgttatggagacatgatggggaaggaaggggtccggacctatggattccgctctccccaggaaacctatgatgtgtattgctatgtggatcatctggacggcgatgtgttccacatcactgctcccagtaaattcaccttcgaggaggccgaagcagagtgtgcaaaccgggatgccaggctggcgactgttggggaacttcacgcagcttggaggaacggctttgaccagtgcgattacggctggctgtcggatgccagcgtgcggcaccctgtgactgtggccagggcccagtgtggaggtggtctacttggggtgagaaccctgtatcgttttgagaaccagacatgcttccctctccctgatagcagatttgatgcctactgctttaaacgacctgatctctgcaaaacaaacccatgcctcaatggaggcacctgctatcctactgagacttcctatgtgtgcacctgtgcacctggctacagtggagaccagtgtgaactggattttgatgaatgtcactctaacccttgtcggaatggagccacctgtgtggacggtctgaatacatttagatgcctctgccttccgagttatgtcggtgcactctgcgaacaagacactgagacatgcgactatggctggcacaaattccaagggcaatgctacaagtactttgctcatcgccgtacatgggatgctgctgaaagggagtgtcgcctgcagggtgcccacctcacaagcatcctttctcatgaggaacaaatgtttgtgaatcgtgtgggccatgattaccagtggattggcctcaatgacaagatgtttgaacatgacttccgctggactgacggcagcgcactgcaatatgagaactggagacccaaccagccagacagcttcttttctgctggagaagactgcgttgtgatcatttggcatgagaatggccagtggaatgacgtcccctgcaactaccacctcacctacacctgcaagaagggaacagttgcttgcggccaaccccctgttgtagaaaatgccaagacctttggaaagatgaaaccacgttatgaaatcaactccttgattagataccactgcaaagatggtttcattcagcgtcaccttccaactatccggtgcctaggaaatgggagatgggcaatgcctaaaataacctgcatgaacccatctgcataccaaaggacttattctaagaaatacttaaaaaattcctcatcagtcaaggacaattctataaatacgtcaaaacatgagcatcgctggagccggaggtggcaggaaacgaggcgctgatcctaaaatggcgaacataagcttcattcatcatttcagccaaagccctgcctttccgtgcctttcctatcacctcaaggagaattagcagttggtttggattttgggactgccgtctggtcatttggggtggctgtattcctaaaatattttcaatgaaacatggaattttgaaaaaaaaaagcgaataaaatgaaagaaaatgagcgaagaagat

SEQ ID NO: 117 - DNA, 649 bp, Rattus norvegicus
catggctaatcgaggagcaacaagacccaacgggccaaatactggaaataaaatatgccagttcaaactggttcttctaggagagtctgctgttggcaaatcaagtctggtgcttcgctttgtgaaaggccaatttcatgagtttcaagagagtaccattggggctgcctttctaacccaaactgtgtgtcttgatgacacaacagtaaaatttgaaatatgggatacagctggccaagaacggtatcatagcctagcaccaatgtactaccgaggagcacaagccgccatagttgtgtatgatattacaaatgaggagtccttttcgagagcaaaaaactgggttaaagaacttcaaaggcaagcaagtcctaatattgtgatagctttgtcaggaaacaaggctgacttagcaaataaaagagctgttgacttccaggaagcacagtcctatgcagatgacaacagcttattatttatggagacatcagctaagacatcaatgaatgtaaatgaaatatttatggcaatagctaaaaagctgccaaagaacgaaccacaaaatccaggcgcaaactcagccagaggaagaggagtagaccttactgagcctgcacagccagccaggagtcagtgttgtagtaactaa

SEQ ID NO: 118 - DNA, 3507 bp, Rattus norvegicus
tggttccccagccccgtgtgcggcaccgccacagtctgggcagcggcggccgggggagcgctactaccatgaactgcttggtcctccttcccagagctgctcatccgggtcggactggagacacactcaggggaccccgccgccgccgccgcgcccccttttctttcggctccatctccactacctcttcctcttcttcttccaccttttcttcctgcttccccccctcccccgccgcggatcctggccgctgctttccagacccaggatgccggggggcaagagagggctggtggctccgcagaacacatttttggagaacatcgtcaggcgctccagtgaatcaagtttcttactgggaaatgcccaaattgtggactggcctgtagtttatagtaatgacggattttgtaaactctctggatatcatcgagctgacgtcatgcagaaaagcagcacttgcagttttatgtatggagaactgaccgataagaagaccattgagaaagtcaggcagacttttgacaactacgagtcaaactgttttgaagttcttctgtataaaaaaaaccgtacccccgtttggttttacatgcaaatcgcaccaataagaaacgaacacgagaaggtggtcttgttcctgtgtacgttcaaggatatcacgctgttcaaacagcccatagaggatgactcaacaaaaggttggacgaaatttgcccggttgacacgggctttgacaaacagccggagtgtgttacagcagcttacaccaatgaataaaacagagacagtccacaaacattcaagactggcagaagttcttcagctgggatcagacatccttcctcagtacaaacaagaagcgccaaagacgccgccgcacatcatcttacattactgtgctttcaaaactacgtgggattgggtgattttaattcttaccttctacaccgccatcatggttccttacaacgtttccttcaaaacaaaacagaacaatatcgcctggctggttctggacagcgtggtggacgttatttttctggtggacatcgttttaaactttcacacgacttttgtggggccgggtggagaggtcatttctgacccaaaactcatacggatgaactatctgaaaacttggtttgtgattgatctgctgtcttgtttaccttatgacatcatcaatgcctttgaaaatgtggatgagggaatcagcagtctcttcagctctttaaaggtggtacgcctcttacgcctgggccgtgttgctaggaaactggaccattacctggaatatggagcagcggtccttgtgctcctggtatgtgtgtttggactggttgcccactggctggcctgcatctggtacagcattggagactatgaggtcattgatgaagtcaccaacaccattcaaatagacagctggctctaccagttggccttgagcattgggactccatatcgctacaataccagtgcagggatctgggaaggaggacccagcaaggactccctgtatgtgtcctccctctacttcaccatgacgagccttacaaccataggatttggaaacatagctccgaccacagacgtggagaagatgttctcagtggccatgatgatggtcggctctcttctttatgcaactatttttggaaatgttaccacaattttccagcaaatgtatgccaacaccaaccgttaccatgagatgctgaacaatgttcgagatttcctgaaattatatcaggtcccgaaaggccttagtgaacgagtcatggattacattgtgtcaacgtggtcaatgtcaaaaggcatcgacacagagaaggtcctctccatctgccccaaggacatgagagctgacatctgtgttcatctgaaccggaaggtttttaatgaacatcctgcattccgattggccagcgatggatgtctgcgtgccttggcagtggagttccaaaccattcactgtgctcctggggacctgatttaccatgctggagagagtgtggacgccctctgctttgtggtgtcagggtccttggaggttatccaggatgaggaggtggtggctatcttagggaaaggtgatgtgtttggagacatcttctggaaggaaaccacccttgctcatgcatgtgccaatgtccgggccctgacttactgtgacctgcacatcatcaagagagaagccttgctcaaagtccttgacttctatacagcatttgcaaactcattctccaggaacctcactctcacttgcaatctaaggaagcggatcatcttccgtaaaattagtgatgtgaaaaaggaggaggaggagcggcttcgacagaagaatgaggtgactctgagcatccccgtggaccacccagtgaggaagctcttccagaagttcaaacagcagaaggagctgaggaaccagggctcagcgcagagcgaccctgagaggagccagcttcaggtagagagccgccctttgcagaatggagcctccatcacaggtaccagtgtggtcactgtgtcacagattacccccatccagacatcgctggcctatgtgaaaaccagcgagactcttaagcagaacaaccgtgatgccatggaactgaagcccaatggtggtgctgagcccaaatgtctcaaggtcaacagccccatcagaatgaaaaacggaaatgggaaggggtggctgagactgaagaacaacatgggggctcacgaggagaaaaaggaagagtggaataatgtcaccaaagctgagtccatggggctgttgtcagaggaccccaagggcagtgactcagagaacagtgtgaccaagaaccccttaaggaaaacggattcttgtgacagtgggattacaaaaagtgaccttcgtttggataaagctggtgaggcccgaagtcctctagaacacagtcccagccaggctgatgccaagcatcccttctaccccatccccgagcaggccttacaaaccacactgcaggaggtaaaacatgaactcaaagaggacatccagctgctgagctgcagaatgactgccctggaaaagcaggtggcagagattttaaaactactctcagagaaaagtgtaccccagacatcttctccaaaaccccaaattccactccaagtacctccccaaataccatgtcaggatatttttagtgtctcaaggcctgagtcacctgaatctgacaaagatgaaatcaacttttaatatatatacatatatatacatatatatttattaatatatttaaaacagtatatacatctatatacataagtgtgtatatatagtatatacatatatattttcacttgctttcattatgatgaacacaatatggattttgatatgtacatactgcatgtccagctggattctggcctgccaaagacaattattcaaaacatagatattgcttgtacattatgcagttgactgcatgcacactttacatttatttatactctctattctgtaat

SEQ ID NO: 119 - DNA, 4198 bp, Rattus norvegicus
gacgcgctgagccgctgccgccgcgggggggaagcctgcgagtagctcgcgtgcccgcagtccgcgtaagccccgcgccccttccacccctggccaggccatggcggaacgtggaggggcgggcggtggtcccggaggcgccgggggcggcagcagtcagcggggctctggggttgcccagtccccgcagcagcagccgccgcagcagccatctcagccgcaacagccaacgccccccaaactggcccaggccacctcgtcctcctcgtccacctcggctgcggccgcctcctcctcgtcctcctccacctccacctccatggccgtcgcggtggcctcgggctctgcgcctcccggcggtccgggaccaggccgcacccccgccccagtgcagatgaatttgtatgctacctgggaggtggaccggagctcatccagctgcgtgcccagactcttcagtttgactctgaagaaacttgttatgcttaaagaaatggacaaagatcttaactcagtagtcattgctgtgaagctgcagggttcaaaaaggattcttcgctctaatgagatcatccttccagccagtggcctggtggaaacagagctccagttaaccttctccctccagtaccctcatttccttaagcgagatgccaacaaactgcagattatgttgcaaaggaggaagcggtacaagaaccggactatcttgggctataaaaccttggctgtgggactcatcaacatggcagaggtgatgcaacaccctaacgagggtgctttagtacttggcctgcatagcaacgtaaaggatgtctctgtgcctgtggcagaaataaaaatctactctttatccagccagcccattgaccatgaaggaatcaagtctaagctgtctgatcgctccccagatattgacaactactctgaagaagaggaggaaagcttctcctcagagcaggaaggcagtgatgacccattacatggacaggacctattctatgaagatgaagatcttcggaaagtaaagaagactcgaaggaaactgacctcaacctcagccatcactaggcaaccgaacatcaaacagaagtttgtggccctcctgaaacgattcaaagtttctgatgaggtgggctttgggctagaacatgtgtcaagggagcagattcgggaagtggaagaggacctggatgaactatacgacagtctagaaatgtacaaccccagcgacagtggccctgagatggaagaaacagaaagcatcctcagcaccccaaagcccaagctcaagcccttctttgaggggatgtctcagtccagctcacagacggagatcggcagtctcaacagcaagggcagccttggaaaagacaccaccagccctatggaattggcagctttagaaaaagttaagtctacttggattaaaaaccaagatgacagcttgactgaaacagacactttagaaatcactgaccaggacatgtttggagatgcgagcacaagtctggttgtaccagaaaaagtcaaaactcctatgaagtccagcaaagctgatctgcagggctccgcctcgccgagcaaggtggaagggacacacacacctcgccaaaagaggagcactcccctgaaggagcggcagctctccaagcccctgagtgagaggaccaacagctctgacagtgagcgctctcctgacctagggcacagcacacagattccacgaaaggtggtatacgatcaactgaatcagatcctggtttccgatgcagcgctccctgagaatgtcatcctggtgaacaccacggactggcagggccagtatgtggccgaattgcttcaagaccagaggaagcctgttgtgtgtacctgctcaacagtggaggtccaggccgtgttgtctgccctgctcactaggattcagcgctactgcaactgcaactcatctatgccgaggccagtcaaggtggcagctgtgggcagccagagttacctgagctccatccttcggttttttgtcaagtcccttgccagcaagaccccggactggctgggccacatgcgcttcctcatcgttcccctaggttctcatccagtggccaaatacttgggctcagtagatagtagatatagcagcacctttcttgattctgcttggagagacctgttcagtcgctcagagcctccagtgtcagagccactggatgtggtgggtcgtgtgatgcagtatgtcaatggagctaccacaacgcaccagctgcctgtggctgaagccatgttgacctgcaggcataagttccctgatgaagactcctaccagaagtttatccccttcattggtgttgtgaaagtgggccttgttgaagactcgccctccactgcaggtgatggggacgattcacctgtggtcagccttactgtgccctccacatcaccaccctcaagctcgggcctgagccgagatgccacagctacccctccctcatccccatccatgagcagtgccctcgccatcgtggggagcccaaatagcccttatggggatgtgattggcctccaggtggattactggctgggccaccctggggagcgaaggagagaaggtgataagagggacgccagttcaaagaataccctcaagagtgtcttccgctcagtgcaggtttctcgcctgccccatgcaggggaagcccagctttctggcaccatggcaatgactgtggtcaccaaagagaagaacaagaaagtgcccactatcttcctgagcaagaagccccgggaaaaggaggtggattctaagagccaagtcatcgagggcatcagccgcctcatctgttctgcaaagcagcagcaaaccatgctgagagtgtccattgatggagttgaatggagtgacatcaagttcttccagctggcagctcagtggcccactcatgtcaagcacttcccagtgggactcttcagtggcagcaaacccacctgagacctgcctcccaaccactccctcctggcactgccacccagcccagcctcctttcctagcactggggcttgcctccacttgcccagtcctgaaggacactgccactggggatgcagtcctccctgctcactgcccagccatctctgcccagctcccccctgttccaggcccagagctgggtgatcctgccttctggtgcccataattcctgtaattgaataatctgggccttccttcacctcacccctgcagcgctggtaccctttctagaaatgaaacacctggagttctggtacacagggagacagcccagcatcctacataagctggccacccagctctgcatttctaaggctctgttgcctgttgtactcaccctgccttcctccagcagggctggggcctcctgccattcctcacctgcctcacagtttcccagtagggggaaggaggatggcacctgggcatcctggagtttctgggattgaagggaccttcccagtctcccatgcatgatttcctgacacttcaagtcgcttggatgtcctgtgttttgtgtgtttttagttgtttgggtaacttgtcctgtgcacaggtccttaaggctccttctccctctgcctcccagcctcctacctaacattgctctgtggcttcatgaggtaggagacagcaaacccacccacccacccaccccttcacccctcaacacatacatcatctgtggctctcatccagtcatattgtccccctctcctgtgtcagcttgcctcctggctctgctctgtcatcccacttccttcatggcagggcagcagaatgaggcccttctccaccaggtctccctccagcagcctccttccctctctcagccatgaatgggtcccagacctacctcagcctccttatcagtgtcttcatgagaggctgaggacaagggacagatctggcccagcctccatgccctctgtgtcctatggcacctcagagcttctccgttgcccctcagtgtttcctagcagtgtggcacggaactgcacttggaacctagttttggtgttcttcacatccaaaactcttaagcccctcccgctgcccagcctgtccagagtatctcctgggcctgagaataagtggggtgggaagactggggccatgttgggttttttcattcaataaactggtgatttcttaccaaaaaaaaaaaaaaaa

SEQ ID NO: 120 - DNA, 1950 bp, Rattus norvegicus
gctggaccccagcctttcttcgctttcgcctcgcggtcgatgactccctagaccccctggcctacgatcatgaccacgtccctgcaagatgggcagagcgccgcgggccgggcgggcgcccaggactccccgctggcagtgcaggtgtgccgcgttgcccagggcaagggagacgcccaggacccggctcaggtccccggactgcacgcgctgtccccggcctcagatgcgacccgccgcggtgccatggacaggagaaaagcgaaagatctggaagttcaggaaacgccttccattcctaaccccttccctgagctctgctgttctccacttacatcggtgctgtcagcaggcctcttccccagatcaaattcaaggaagaaacaggtgattaaagtttacagcgaggatgagaccagcagagcgttagaggtgcccagtgacgtcacagcccgtgatgtctgccagctgttgatcctgaagaaccactatgtcgacgacaatagctggaccctttttgagcacctgtctcacacaggcgtagaaaggacagtggaggaccatgagctgctgactgaagtgctgtctcattgggtgatggaagaagataataagctgtatcttagaaagaattatgccaaatatgaattttttaagaacccaatgtatttctttccagagcacatggtgtcttttgcaactgaaatgaacggtgacagatcccttacacagatcccgcaggtgtttttaagctcaaacacatatcctgaaatccatggcttcctgcatgcaaaggaacaggggaagaagtcttggaaaaaagcttacttttttctcagaagatctggtttatatttttctactaaaggcacatccaaggaaccacggcacttgcagtttttcagtgaattcagcactagtaatgtttacatgtcactggcaggcaaaaaaaagcatggagcgccgactccctatggattctgctttaagcctaccaaagcaggagggccccgggacctgaaaatgctgtgtgcagaagaagaccaaagcaggatgtgctgggtgaccgccattagattgctcaagtatggcatgcagctctaccagaattatatgcatccatcccaagctagaagcgcctgcagttctcagagcgtatcacccatgagaagcgtatcagagaattccctagtagcaatggacttctcaggtcagaagaccagagtcatagacaaccccactgaagccctttcggttgccgttgaggaaggactcgcttggaggaaaaaaggatgtttacgcctggggaatcatgggagtcccactgcgccctctcagagctctgctgtgaacatggctctccaccggtcccagccatggtttcaccacagaatttctagagatgaagctcagcagttgattacccggcaggggcctgtggatggagttttcttggtacgggatagtcagagtaaccccagaacttttgtactgtcaatgagtcacggacaaaagataaaacactttcaaattatacccgtggaagatgatggtgaggtgttccacaccctggatgatggccatacgaagttcacagatctcatccagctcgtggagttctaccagctcaacaagggggtccttccttgcaagctgaagcattactgtgctaggatggctgtttagccaaactgtctgtgactcgttaaactatggaagatggaggatgcaaagaagaatgattagagagagagagagagagagagagagagagagagagagagagagagagagaggagatcacaaggctggaaacaaatcatggtgaaaagaagattcacctgtgggttacaaaaaaataggtcacgtattgcaaattagtgaagacttggattcgtattactctcgttactttaaatttattagttaaaattaaaccttattaaaaaa

SEQ ID NO: 121 - DNA, 4784 bp, Rattus norvegicus
gagaaagctctgtagtagacagagtgactacaggagaccctgggttcaaaggtggtagggtagagaggtggacctaacagaagaaaaaaagaaaaaaagaaaaagaaatgcaatctcaacgtcaacctcatgctgggccaggctcaggagtgcctgttggagaagtccatgttggacaaccggaagagcttcctagtggcccgcatcagtgcacaggtggtcgattactataaggaggcatgccgggccttggagaaccctgacactgcgtccctgctgggccgcatccagaaggactggaagaaactcgtccagatgaagatctactacttcgcggctgtggctcatctccacatggggaagcaggctgaggagcaacagaaatttggggaacgggtggcctacttccagagtgccctggacaagcttaatgaagccatcaagttggccaagggccagcccgacactgtgcaagatgcacttcgttttgctatggatgtcattgggggaaagtacaattctgccaagaaggacaatgactttatctaccatgaggctgtgccagcactggatacccttcagcctgtgaaaggagcccccttggtgaagcccttgccagtaaaccccacagacccagctgttacaggtcctgatatctttgccaagttggtacccatggctgcccatgaggcctcatcactgtacagtgaggagaaggccaagctacttcgggaaatgctggccaagattgaagataagaatgaagtcctagatcagttcatggactccatgcagcttgaccctgacacagtggacaacttggatgcctacaaccatatcccaccccagctcatggagaagtgtgcagcactcagtgtccggcctgacactgtcaagaaccttgtccagtctatgcaggtgctgtccggggtgttcacggatgtggaggcctccctgaaggacatccgggatctactggaggaagatgagctgcaagagcagaaattgcaggagaccttgggccaggctggggctggccctggcccttctgttaccaaggctgagctcggagaggtgaggcgagaatgggccaagtacacggaagtgcatgaaaaggcttccttcaccaacagtgagctgcatcgtgctatgaatctgcacgttggtaacttgcgcctgctcagtggaccactggaccaggtgcgcgctgccctacccacaccagccctcaccccagaggacaaggctgtgctgcagaacctaaagcgcatcctagccaaggtgcaggagatgcgggaccagcgcgtgtccctggaacagcagctccgagagctgatccagaaggatgacatcactgcctccctggtcaccactgaccactcagagatgaagaaactgtttgaggaacagctgaagaagtatgaccagctgaaggtgtacctggagcagaacctggctgcccaggacaatgtcctccgggcactgaccgaggccaacgtgcagtatgcagcagtgcggcgggtgcttagtgaactggaccaaaagtggaactccacactacagaccctggttgcatcctatgaagcctatgaggacctgatgaagaagtcccaggagggcaaggacttctatgcagacttggaaagcaaggtagccgccctgctggaacgggcacagtctctctgccgtgcccaagaggccgctcgccagcaactcctggacagggagctgaagaagaaggcaccaccacctcggcccacagccccaaagccattgctgtcccgccgtgaggagggagaggccgcagaggctggagaccaacccgaggagctgcgcagcctgccccctgacatgatggctggcccacggctgcctgacccattcctaggaactgctgcccctctccacttttctcctggccccttccctggttccacaggcccagcaacccactatctctcaggacccttaccacctggaacctactcaggccccactcagctgatgcagcctagggctgcagtgcccatggcccctggacctgtcctctacccagcccctgtctatacatcggagttgggccttgtacccagatcctctccccagcatggaattgtaagcagtccctatgcaggggtagggccaccccaaccaatcgtaggtcttccctctgctccaccaccccagttctcaggacctgagttagccatggacgtccggccagctaccactacagtagatagtgtccaagcccctatctctagccacatggcactacggccaggccctgccccagctcctccccagccttgctttccagtgcctcagcctgtaccccaatctgttccccagccgcagcctctgcccacaccctatacttattctatagggaccaagcagcacctcacaggccctctaccacagcatcactttcctcctgggatccctaccagttttcctgcccccaggattgggccccagcccccacctcagcttcagccccagccccagccccagccccagccccagcctccgcctcagccccagccccagccccagccccagccccagccccagccccagccccagccccaacggccagtatttgggccacaacccacacaacagccccttccattccagcatccacatctcttcccatctcaggccccagggattctcacaccaccacccccctacccttttactcctcagcctggtgttttgggacagccaccacccacccggcacacccagctctacccaggcccacctccagacactcttcccccacactcaggggctctgcctttcccgagccctgggcctcctcatcctcaccccaccctggcatatggccctgccccttcccctaggcccctgggtcctcaggcaacccctgtctccattcgaggtcccccaccagccaatcagcctgcccctagtccccacttggtgccttcacctgccccatcgccagggcctggcccagtaccttcaagacccccaacagcagagccaccaccatgtttgcgccgaggtgctgcagctgcagacctgctgtcttccagccctgagagccagcatggagggactcagcctcctgggggcgggcagcccttgctgcagcctaccaaggtagatgcagcggagcggccgacggcacaggccctgcggctaattgagcaggacccctatgaacatcctgagaggctgcagaagttgcagcaggagctggagagctttcggggccagctgggggatgcaggagcactggatgctgtctggagagagttgcaggaggcccaggaacacgatgcccgaggccgatccattgccattgcccgctgctactccctgaagaaccggcaccaggacgtcatgccgtatgacagtaaccgtgtggtgctgcgctcaggcaaagacgactacatcaatgctagctgtgtggaggggctctcgccatactgtccacccttagtggccacccagcgtccgctgcctggcacagctgcagatttctggctcatggtgcatgaacagaaagtgtccgtcattgtcatgctggtgtctgaggctgagatggaaaagcaaaaggtggcccgctacttccccattgagaggggccagcctatggtgcacggggccctgagcgtggccctgagcagtgttcgtactactgatacccatgtggagcgagtactgagcctgcagttccgggatcagagcctcaagcgctctctcgtgcacctacacttccctacttggcctgagttaggcctgccagacagccctggcaatctgctgcgcttcatccaggaggtgcacgcacattatttgcaccagcgacccctgcacacacctattgtcgtacactgcagctcgggggtgggccgcacaggagcctttgcgttgctgtatgccgccgtgcaggaggtagaggctgggagtaggattcctgagttgcctcagctggtgaggcggatgcggcagcagaggaaacacatgctgcaggagaaactgcacctcaaggttctgccacgaggcattggtgcgacatgtggagcaggtcctgcagcgccacggcgtgccgcctcctggcaagcctgtggccagcatgagcgtcagctagaagagccaccttcctcaggactcccaggatctggtccttggtggagacgtgcccatcagctccattcaggctaccattgccaagctcgcatccggcccctgggtggcctggattcccccgctgccagccttcccagccttgtagagcccccaggtcttccaccagctagccttccagagcccacccctgccccaccttcctcgcctccccccccctcttcccctctgcctgaacccccccagccagaggaggagccatcagtgcctgaagcccccagcttagggcctccctcgtcatccctggagctgttggcctctctgactccagaagcattttccctggacagctctttgcggggaaagcagcggatgagcaagcagaactttctgcaggctcacaacgggcagggtctcagggctgcccaacctacggatgaccccctcagcctcctggatccactctggacacttaacaagacctgagaaggctttgcctgtctggtccttacactacacctcccatccctgctgccttcagctgtgccagatggagatgcacttcaggcctcagtcaggctctgctccttcctttgcggaacctgacatttttccagccctgggctattgacataataaacttactctgtgaaaaa

SEQ ID NO: 122 - DNA, 2910 bp, Rattus norvegicus
  misc_feature (1)..(2901): n = a or c or g or t
ggcacgagctttacttatgtcacaggcataataaaacatgacttcattatataaggggctatgcttaaactgaaagagaagtaggagagagttatggagatgtgaatggacctattttgagctgtgaggctacattttaaggtacctacttagattataagcctgatgtgaactccaagagttcaataatcatgactattcatacaccttgcctgctgtgtctagcagatcaaatgaggaaacactaaccttgcggctgactgtagaaattagatcaatttagaggagtgggaacacatgtttgttatcaagagactaccatgtgtcattgtgggaataggagcagagaccttggtcctttgagattgctttcttagacataaaagggggacgctggtgagagaagcacacaagtagacatgattatttcactcctctgtctgccagatccctagagcatcagctggtgttccagcagcttgttccccgagcctcctgagtagcattatagagaggtctgttccagaaagcgaaagccagatccagctgccctcctggagcagaacaacacaatttccaggctgtccctgtggcctctccctcttccagtctgccccacttggtgtcagcgatgagctcctgcaacttcactcacgccaccttcatgcttatcggtattccaggactggaggaagctcacttttggtttggcttccccctactttccatgtacgctgtagcattgtttggaaattgcattgtggtcttcatcgtgaggacagagcggagcctgcatgcgcccatgtatctttttctctgcatgctggcagctattgatctggctttgtccacctctacaatgcccaagattctcgccctcttttggtttgactcccgggagattacttttgatgcctgtctcgcccagatgttcttcattcacgctctctcagcaattgaatctaccatcttgctggccatggcctttgaccggtatgtggctatctgccacccactgcgtcacgctgctgtgctcaacaatacagtaacagtccaaatcggcatggtggctctggtccggggatccctattctttttcccactcccactgctgatcaagcgactggccttctgccactccaatgtgctctcccactcctattgtgttcaccaggatgtgatgaagttggcctatacagacacattgcccaatgtagtctatggtctaactgccattctgctagtcatgggtgtagatgtcatgttcatctccttgtcctatttcctgattatacgagcagttctgcaattgccttccaagtctgagcgagctaaggcatttggaacctgtgtgtcacacattggtgtagtcctggctttctatgtcccactcattggcctgtcagtagtgcaccgttttggaaacagcctggatcccattgtgcatgttctcatgggcgatgtctacctgctgctgcctcctgtgatcaatcccatcatctacggtgctaagaccaaacagatcagaacacgggtgctggctatgttcaagatcagttgtgacaaggacattgaagctggaggaaacacgtgacccttaccgttctatcacccttgtcctacatggcttaatataatgattaataattcatcacaccggcctaactccagtcacccaaaagcacattagtgctttaactgaatgggacagtgaactaaagtatggtttatcttcatcatggatacaatgtgaaatatctatcatgtgttttaaagcttgtgctataaaatgagacccattgataatactaaatgaaacaactaggatttgtgatttaaactaattgtttgtgatttgaatgagatatgttgaaattactagcaactttttttattccnacttcctttgttgtaaagctatctgtaatgtttaacttctgaattgtggaacatggagctgacagtatggtagccaagggtttcctcactcatttcaatgctattattcactacccaggaacatttatgagctctaaataatatggctcatgaatgtatcatgtaacgtgttccagtccctgcgttaagtacttttcagactttctgtgatcttgctcttttcccaaggaagataccattgttgcctgccacaacatgtgacaaagactttaatgagtaaagaaactttcttgaatgttctgtgccaagattttaaattaaattggataattgaatacatttgctttaccaccatgttatattgcttcctgtttaacatctgccatctatttcctctgcctattacaaatcctgctttctctctgccgtgtgctagcatggacgtctttgtgtttgtggtaagtgattaaccctgtcctggtggagggcaacaaactgttcagcatgacagagtagctgcttcttctcatatgaacagaggagatttaaattttttagtctcttacatatccttgattgtgtcctctttgtattgtgtcctgtagctgtcaaatctcttaaatgtataacataagatattgcctgattcttgacttaggtatcaaacaacataataatttatcttaaaatgttcagtattatttttactgttttaatgttcataagtaatgttgggagacatgagtgatttcccccagtcctctttaccaacagtgcaaagggcctgccaggtatgggttgcacaactataaagatgttgaatgaacttatgtagaatattccctttgtattgagtggatgatgaaaatgttcttagattagggtattaatgacacctacaaaataatgttaatatattcgatgtacgcataatgcttaaaatgctgagatttatgtagtatgtatctgccacaataaaaaatcatttaaaataaaaaaaaaaaaaaaaaa

SEQ ID NO: 123 - DNA, 3624 bp, Rattus norvegicus
gcgcctgggtcggctcgccgggctccgagagtggccggctccgggctgcgagggccggcggcggccgagggatgcgccgctcccggccgagccgatcccaccgctccaggtgagacggctccaggggcgcagagagccgcggccatgggaaccctgggcaaggcgagagaggctccgcggaaaccttgccatggctccagagctggccccaaaggaagactagaggccaaatcaaccaacagtcctctccctgcccagcccagcttggcccagatcacccagttccgaatgatggtgtccctgggacatctggccaaaggagccagcctggatgatcttattgacagctgcattcaatctttcgatgcagatggaaacctgtgtcgaagtaaccagctgttacaagtcatgctaaccatgcaccgaatcatcatctcctcggccgagctgctgcaaaaactcatgaatctatataaggacgccctggaaaagaattctccaggaatttgcttgaagatctgctattttgtcaggtattggataacagaattctggatcatgttcaaaatggatgccagcttgaccagcaccatggaagagtttcaggacctggtgaaagccaatggtgaggagtcccactgccacctcatcgacacgacacaaattaattctcgagactggtccaggaaactgactcagaggataaaatcaaataccagcaagaagcggaaagtgtccctgctgtttgaccatcttgaacctgaagaactgtctgaacacctcacctaccttgagttcaagtccttccgacggatatctttctctgattatcagaattaccttgtaaacagctgcgtaaaggagaaccccaccatggagcggtccattgccctgtgcaatggcatctcccagtgggtacaactgatggttctcagccgtcccaccccacagctccgggcagaggtcttcatcaagttcatccatgtggctcagaagctccaccagctacagaacttcaacacgctaatggctgtgatcgggggactgtgtcacagctccatctccaggctcaaggagacaagttcacatgtcccacatgagatcaataaggttctgggtgagatgactgaactgctgtcctcctgcagaaactatgacaactacaggcgagcctatggtgagtgcacccacttcaaaatccccatactgggtgtgcacctcaaggacctcatatccctatatgaagccatgcctgactacctggaagacgggaaggtgaatgtccaaaagctcctggccctttacaatcacatcaatgagttggtccagctgcaggacgtggccccaccattggatgccaacaaggacctggtgcacctgctgacgttatccctggatctatactacaccgaagatgaaatctatgagctttcctacgcccgtgaaccaaggaaccacagggccccgccactgacaccttcgaagccaccagttgtagtggactgggcctctggagtgtctcccaaacctgacccgaagaccatcagcaaacacgtccaaaggatggtggattctgtctttaagaactatgatctcgaccaggatggatatatctctcaggaggagtttgaaaagattgctgcgagctttccattttccttctgtgtgatggacaaagatagggagggcctcatcagcagagacgagatcacagcctacttcatgagggccagctccatctattccaagctgggcctaggctttccacacaactttcaagagaccacttacctgaagcccaccttctgtgacaactgtgctggctttctctggggtgtgatcaagcaaggctatcgctgtaaagactgtgggatgaactgccacaaacagtgcaaagacctggtagtgtttgagtgcaagaaacgatccaagagcccggcggtatccacagaaaacatcagctctgtggtgccaatgtccactctttgtccactgggaaccaaagatctgctccatgcacccgaagaaggatctttcattttccagaatggagaggttgtggaccacagtgaggagagcaaggataggaccatcatgctcttgggcgtatcctcacagaaaatttcagttcggctgaagaggactgttgcccacaagaccacccagacagaatcatttccttgggttggcggcgagatgccccctggtcactttgtgctgacttctccaagaaagtcagcacaaggggctctttatgtgcacagtccagcatctccgtgccccagcccagcactggtccggaagcgggcattcgtcaagtgggagaacaaagagtcccttatcaaaccaaaaccagagcttcacctcaggctccggacctaccaagaactggaacaggaggtaaataccctgagggcagataacgatgctctgaagatccagctgaagtatgcacagaaacaaatagaatccctgcagcttggcaaaagcaatcacgtcttagcacagatggaccacggtgatggtacttaatccagaaattcaaggaacagaatctgcagacgggtttactgggatctcacttcaaaactgattgcagaggttcagcaactttagactgattgacttttaaagggcagagatagccactgttattggtgtccttggttttttccctaactgtctttaatgtgagtcgtgggttttcagtcagttgagtaaaagggaagaaaagttccagcatgtaaaacactgagcagtcatattctaaccttttctttcttttactgaaaccaataccaaacatgtgctaaaataagagtatagtttcctgacagtgtctcaggcagcctgctttactgattcgcacttagataaagagcccctggtgaatcaatttgctgccttccccagggtttctgcaaactgggagttactttgttctacccgaaaacctgctcataatggaaacaataccctaaaagtggtgactttgacatgcctgcattgtttgtgaagctgatccctaccttattcactacctcagatctcaagagcctctttccctgtcctttacttgccccctatttcctcccttgcttgtaggcacatcagcatatctacctagaagtgacctcctagagatgtagcctgtgtttaaatccagagcttcttaattgaacttgacattgtctgattgcaggccaacttatagctctaggtcttagtcattatgaaatacaaaataaaactacccataatcatcaattaccatgtcatacacagaactcattatctaagtcaaacgacgtaaacacgcctgtccagatagtctttctttagtggatagaattaacaatctgtgaccttttaaaagacatggtctgtgaacagtgtttagttcttcacgttctagtctctctctctctctctctctctctctctctctctctctctctctctctcaagtaaactatcgtaaggtcctcttttgaactgaatctgtgcttaaaattgtcttcacttttattatctacaaataagctatgggaggcgatggctttaacagctgacagcatttacctatgtgtagaatatgtgtatatagtatcaggcatgcatgga

SEQ ID NO: 124 - DNA, 1536 bp, Rattus norvegicus
cgctgcgcgggtctcagagccggttcggcgcgtcgactgtccagagtccgcggccgaggagacccgaggtccaggagacaagtgactatggcttaccacagcttcctggtggaacccatcagctgccatgcctggaacaaggaccgtactcagatcgccatctgccccaacaaccacgaggtgcacatctacgagaagagcggtgccaagtggaacaaggtgcacgagctcaaggagcacaacgggcaggtgacaggcatcgactgggcccccgagagtaaccgcattgtgacctgcggcacagaccgcaatgcctatgtgtggacgctgaagggccgcacgtggaagcccacgctggtcatccttcggattaatcgagctgcccgctgcgtgcgctgggcccccaatgagaacaagttcgccgtgggcagtggctcccgtgtcatttccatctgttattttgagcaggagaatgactggtgggtgtgcaaacacatcaaaaagcccatccgctccactgtccttagcctggactggcaccccaacaacgtgctcctggctgcaggctcctgtgacttcaagtgcaggatcttctctgcctatatcaaggaggtggaggaacggccagcccctacaccgtggggctccaagatgccctttggggagctgatgtttgaatcgagcagcagctgtggctgggtgcatggtgtctgcttctcggccggtgggagccgagttgcttgggtcagccatgacagcactgtgtgcctggtagatgctgagaagaagatggccgtggcaaccctggcctctgagacattaccgctcctggccatcaccttcatcacagaaaatagtctcgtggcagcgggccacgactgcttcccggtgctgtttacctatgacaacgctgcggggacattgagctttggtggccggctggatgtgcccaagcagaactcccagcgtggcctgacagcccgagagcgcttccagaacctcgacaagaaggccagctctgaagggggtgcagccacaggggctggcctggattcactgcacaagaacagcgtcagtcaaatctcggtgctcagcgggggcaaggccaagtgctcgcagttctgcaccacaggcatggacggtggcatgagcatctgggatgtgaagagcttggagtcagccttgaaggacctgaagatcagatgagctgtgaggagtgctgtcctcatcccacatgctggggaggagggaaaggggttggggaggctaagggctgctttgctgaatgcttctagggtgtagtacaggtctgcaaaggggatgctctctctccaaagaggggaagaggaaggtggggaactttcctgcctatttaatgaaaatgtgccttttaaagagatgctttcattcattgcaaaccaaaaacaagacaaaaaacccaaagcacaatgctggtcataaactgcttcaaaatgtgggctaataaacataccaaatgtgaaaaaaaaaaaaaaaaaaaaaaaaaaaaaaaaaaaa

SEQ ID NO: 125 - DNA, 1998 bp, Rattus norvegicus
ggcacgagcccaaaagcaatggtctccctgcaggtgtcttcacttccccagacgctgatcctggcttttctccttccccaggcactgccagctggtgtcttcgagctacaaattcattctttcgggccaggaccaggccccgggaccccacgctccccctgcaacgcccgaggcccttgccgcctcttcttcagggtctgcctgaaaccgggagtctcccaggaggccgccgagtccctgtgcgccctgggcgcagcactgagcacgagcggcccggtctacacggagcagcctggagtgccagcggctgccttgtcgttgcctgatggcctcgtgcgtgtgcctttcctcgatgcctggccgggcaccttttccctcattattgaaacctggagagagcagctgggagagcgtgctgcagggcccgcctggaacctattagcgcgtgtggccggtcgcagacgcctggctgctggagccccgtgggcccgcgatgtgcagcgcacaggcgcatgggagttgcacttctcataccgcgcgcgctgtgagccccctgcggttggggccgcctgcgcgcgcctgtgccgctcgcgcagcgccccctcgcggtgtggcccaggactgcgcccctgcacgccattcccagacgagtgtgaagccccgcgtgagtccctaaccgtatgtcgagcgggctgcagccctgagcacggctactgtgaagaacctgacgaatgccattgcctggagggctggactggacccctctgcacggtccctgtctccaccagcagctgcctgaactcccgggtctctggtcctgccggcactggatgccttttacctgggcctggaccctgtgatgggaacccatgtgccaatgggggcagctgtagtgaaaccccgggctcctttgaatgtgcctgtccccggggattctatgggcctcgatgtgaggtgagcggggtgacatgcgcagatggaccctgcttcaatggcggcttgtgtgttggcggtgaagatcctgactctgcctatgtctgtcactgcccacctgctttccaaggctctaactgtgagaggagggtggaccgctgtagcctgcagccttgtcagaatggcggcctctgccttgacctgggacatgcgctgcgctgccgctgtcgcgcgggattcgccgggccacgctgcgagcacgacctggacgactgcgccggccgcgcctgtgccaacggcggcacgtgcgtggagggcggcggcgcgcgccgctgctcgtgtgcgctgggcttcggcgggcgcgactgtcgggaacgcgcggacccctgcgcctctcgcccctgcgcccatggaggccgttgctacgcccacttctccggccttgtctgcgcctgcgcgcccggctacatgggtgtgagatgcgagttcgctgtgcgccccgacggggcggacgccgtgcccgcggctccgcggggcctgaggcaggctgactcacagcgcttccttctgcctcccgccttggggctgctggcggccgcagctttggccggggccgctctcttgctcatccacgttcgccgccgaggtcctggccgggatactgggactcgcctgctttccgggacccgggagccttcggtccacacgctcccggatgcactcaacaacctgaggttacaagacggtgctggggatggccccacgtcgtcggctgactggaatcatcccgaagatggggactctcgatctatttatgtcataccagccccttccatttacgcacgagaggcctgatgctgctccttctctgccatcgtctggagatggagcctgaatgattttatttgctttgtggtgtgtccaatccctgccccacaccgactggaggctgtttaatagggctttattgtacatattgcttatttataacctagtttttgttatcgccccagagacatctataaaggttcttattttgatcaactaaaaaaaaaaaaaaaaaaa

SEQ ID NO: 126 - DNA, 1259 bp, Rattus norvegicus
ggcacgagggcgagggtgcagccccggagcggcggcggggcaaaatgaaaaacgaaattgctgctgttgtcttctttttcacaaggctggttcgaaagcatgataagttgaaaaaagaagcagttgagaggtttgctgagaaattgactcaaatacttcaagagaaatacaaaaatcactggtatccagaaaaaccctcaaaaggacaagcctacagatgcattcgtgtcaataagtttcagagagttgatcccgacgtcctgaaagcctgtgaggacagctgcatcctgtacagtgacctgggcttgccaaaggagcttacactctgggtggatccgtgtgaggtgtgctgccggtatggaaagaaaaacaatgcattcattgttgccagctttgaaaatgaggatgagaacaaggatgagatctccaagaaagttagcagggctcttgataaggtgacctctgattatcattcagggtcctcctcctcagatgaagacacaagcaaggaagtagaagtgaaaccgagtgcagtggctacaacgccaagccccgtgtaccagatttcagaactgatattcccacctcttccaatgtggcaccctttgcccagaaaaaagccaggaatgtaccgagggggtggccatcagagtcactaccctcctcctgttccatttgcttatccaagtccaggaaggaagaataaagcgttccgcccaattccagtgacatgggtacctcctcctggaatgcattgtgatcggaatcactggattaatcctcacatgttagcacctcactagttcatttggattgggcggatgtcattttgatagaaaggaagaaataccttcttagatacttaagagtttcacaacttgtagtgaagtcagatggacaaaaccatcaggcttatttttatagaaaagctattgagataatctttcttaaagtatatatatatatgcactttagatatattgatatagtttgagaaactttattaaagttagtcaagtgcctgagtttttaatattggacttgagtatttatatattgtgcattgactctgttggatacaaaacactgtaggagggcgatatgttttagcacctttgagcatttactttatggagaatatgtaagttatttatacagaaggacatttattttatgtcacatagaagaattgtgtgaaatcatgtagttgcaaataaaaagtagtttgaggcgtgaaaaaaaaaaaaaaaaaaaaaaaa

SEQ ID NO: 127 - DNA, 2703 bp, Rattus norvegicus
cgcccgcatggcccggggcgagaggcgacggcgcgctgcggccgcagagggggcgcgcccgctggagagggcgcggggtgcgggccggcgggatggcagagccggcggggcgcgcggctcggcgggcggcgcggccctggccgtggtggttttggcgctggccttcggcctgtcggggcgctgggtgctggcgtggctgggtgtgcgccgcgcgctcacactgcaccccgctccgtcagcgctaccgccggactcctccagtcctgccgtggccccggaatttttttggggtacctatcgcccacacgtctatttcggcatgaagactcgcagccccaaaccactgctcacgggactgatgtgggcgcagcaaggcgccaccccggggacccctcctaagctcaggcacacatgcgaacaaggagacggcgtgggtccctatggctgggagttccatgatggactctcctttggtcggcaacatatctatgatggggccttaaggctcaccactgagttcgtcaagagatctgggggtcatcacggaggggattggagctggagagttaccgtagagcctcaggcctcaggtacaccttccttccctttggtctccctgttcttctacgtggtaacagatgggcaagaggtcctactaccagaggttggagccaaaggacagttgaagttcatcagtgggcacaccagtgaacttggtgacttccgcctcacacttctgccaccaaccactccaggagacactgtccctaagcatggcagctacaatgtcttctggtcctccaacccagggctgcctctgctcacagacatggtaaagagccacctaaacagctggtttcatcaccggcccccaggagcctctccggaacgataccttggcttgcctggatctcttaagtgggaagagagaggccctagtgggcaagggcagttcttggtccagcaggtgacactgaaagcccctttctctgtggagtttgtgtttgaatctggcagtgccaggacaggaagagaccaagcctctgagcagctggtaggtggccaactgacccgggccctggagagccatgctgcagcattcaaggagcgttttgagaggaccttccagctaaaggagaagggcctgagccctgaggagcaggctctgggtcaggttgccctcagtggcctacttggtgggattggttacttctatggacagggtttggtgttgccagacactggcatggaagggtctgaacagaaaatggacccttccctatttccgcctgtcccccttttctctggggtcccttcccggtcattcttcccacgaggcttcctctgggatgaaggctttcaccagctagtggtccagcgatgggatccccacctcacccgggaggccctaggacactggctggggctgctcaatgctgacggttggattgggcgagagcagattctgggggatgaggccagagcccgagtgcccccggaattcctagtgcaacgtgcagcccatgccaaccctccaaccctgctcctgccagtcatacacatgctagaaggccgggcccctgaggacttggccttcctgcgcagggctttcccccgcttgcatgcctggttctcttggctccatcaaagtcaggcagggccagtgccactttcctaccgctggcggggcagggatctagctttgcctaccctacttaaccccaagacactgccctcgggcctggatgactaccccagggcctcacatccttctgcagcagagcggcacctggacctgcggtgctgggtgacattgggtgcccgggtgctgtcacagcttgcagaagagcttggggagactgaagctgctgcagagttgggcccattggctgcctctctagaagcagctggaagtctcgatgagctgcactgggctcctgagctgggtgtctttgccgactttgggaaccacacaaaagcagtacagctcaagtctaggcccccacaggggctggttagggtggtaggcaggcctccagctcgactgcagtatgtggatgccctgggctatgtctctctttttcctttgctgctacaactgctggagcccagctcaccccgcttgggacccctgctggacgttctagctgatagccgccatctctggagcccctttgggttgcgctccctttcagcctccagtctcttttataaacagcgaaatacggaacacgatccaccttactggcgaggtgcggtgtggctgaatatcaactacctggctttgggggcactacaccactatgggcgtgtggagggtcctcacaaggttcaggctgccaaactctaccgtgaacttcgggccaatgtagtaagcaacgtacggcagcaataccaggctacagggtttctgtgggaacagtacagtgaccaggatgggcggggcatgggctgccgccccttccaaggatggaccagtcttgttttactgatcatggctgaagagtactagtgggacagaaggaaagctaggcctttgtgtcacttggaatatgcagacaagggcttgggtttctggtctcagtgtttcagatcccgtaagctcatctcaggtgtctccttattgtcatcccatacagctctggggtgaacgtgaactcaaagagtctatttttctaaataaactggaaaacaacggaattc

SEQ ID NO: 128 - DNA, 5927 bp, Rattus norvegicus
ggctggcacagggcttgtaaataaactgcgatgctgtctcgggctcgccggcccgggtgccgccgtcgccgccgcctccctggagcttcggtgccaggctcccgccgtcgcgcgccctagcgccaccgcgccagcctcgcgcgccctcgccgggctccgcacggaccccggcttcccgcgcccctccgggtcctacaggggacccgctcgggatgtgaccccttgactccccatccgacctcccctgccccccgggaggcccgcctttgccttcttttgggggggtgggcggggaggggcgcgcggatcatggcattggagttcccgggcttgcagccgccgccgccgcctcgtccacgtaccccaagcgctccttcttcccggagcagcagcggagaaggcgaagcgcccggtgggggcgaggcggatggggctcaaggctcgcagggcggcgggggcggccggcgggggcggcggcgaagggggcggaggaggcggcggggcggctaacccggctggaggggactcggcagtggccggcgacgaggagcggaaagtggggctggcgccaggagacgtggagcaagtcaccttggcgctagggaccggagccgacaaagacgggaccctgctgctggagggcggtggccgcgaagaggggcagaggaggaccccgcagggcatcgggctcctggcaaagacccccctgagccgtccagttaagaggaacaacgccaagtacaggcgcatccaaactttgatctatgacgccctggagagaccgaggggctgggcgctgctctaccacgcgcttgtgttcctgattgtcctgggatgcttgattctggccgtgctcaccactttcaaggagtatgagactgtgtctggagactggcttttgctgctggaaacatttgctattttcatctttggagctgagtttgctttgaggatctgggctgcaggatgttgctgtcgatacaaaggctggcgtggacggctgaagtttgccaggaagcccctgtgcatgttggatatcttcgtgctgattgcttctgtgccagtggttgccgtgggaaaccagggcaatgtcctggctacctctctgcgaagcctccgcttcctgcagatcctgcgcatgcttcgaatggataggaggggtggcacctggaagctcctgggctcagctatctgtgcccacagcaaagaactcatcaccgcctggtacatcggcttcctgacactcatcctttcttcatttcttgtctacctggtggagaaggatgtgccagagatggatgcccaaggagaggaaatgaaagaggagtttgagacctatgctgatgccctgtggtggggcctgatcacactggccaccattggttatggagacaagacacctaaaacctgggaaggacgtctgattgctgccaccttttctttaatcggcgtctccttttttgctcttccggcaggcatccttggctcaggactggcattgaaggttcaggaacagcaccgtcagaagcactttgagaaaagaaggaagccagctgctgaactcatccaggctgcctggagatattatgctaccaaccccaacaggcttgacctggtggcaacctggagattttatgaatcagttgtctctttcccattcttcaggaaagaacaactggaagcagcagccagccaaaagctgggtctcttggatcgggttcgcctttctaatcctcgtggtagcaatactaaaggaaagctatttacccctctgaatgtagatgccatagaagaaagcccttccaaagagccaaagcccgttggcttaaacaataaagagcgtttccgcaccgccttccgcatgaaagcctacgctttctggcaaagttctgaagatgccgggacaggagaccccatgacagaagacaggggctatggaaatgacttcctcattgaagacatgatccccaccctaaaggctgccatccgagctgtcagaattctacaattccgtctgtataaaaaaaaattcaaggagacattgaggccttatgatgtaaaagatgtaattgagcagtattccgctggacatcttgacatgctttccaggataaagtaccttcagacaagaatagatatgattttcacccctggacctccatccactccaaaacataagaagtctcagaaagggtcagcatttacctacccatcccagcagtctccaaggaatgaaccatatgtagccagggcagccacatcagaaactgaagaccaaagcatgatggggaagtttgtaaaagttgaaagacaggttcacgacatggggaagaaactggacttcctcgtggacatgcacatgcagcatatggagcgtctgcaggtgcacgtcaccgagtactacccaacaaagggggcctcctccccagcagaaggggagaagaaagaggacaacaggtattctgacttgaaaaccatcatctgtaactactcagaatcaggcccccccgacccaccctacagcttccaccaggtgcccatcgacagagttggtccctatgggttttttgcacatgaccccgtgaaactgaccagagggggacccagttctacaaaggctcaggccaaccttccctcctcgggaagtacatatgcagagaggcccacagtcctgcccatcttgactcttctggactcatgtgtgagctaccactcccagacagaactgcaaggcccctattcggaccacatctcaccccgccagagacgcagcatcactagggacagtgacacaccactgtccctcatgtccgtcaaccacgaggaactggaacggtctccaagtggcttcagcatctcccaagacagagatgattatgtatttggccccagtgggggttcgagctggatgagggaaaagcggtacctggcagaaggagaaacagacacagatacagaccccttcacgcccagtggatccatgcctatgtcatctactggagatggtatttcagattccatatggaccccttccaacaagcccacttagaaggggtcactggctgactcctggtactgtagtcagactttgtacagctcacttactctcacatctagtgcttaacaatgaggactccagtggctgtgtcaagcgcatgcatgtgcgcggtggcccccctgcaagcaggggcttctcacagccttcttcctccccatgtcactgcaacaaagtcgcttccttttcagcatggtttgcatgacttgacactatataaaatgcactgttagtctcttctagatacacatttatctgctcttccttttaatcacgattgaacaagtacagggagacttactgatgagctgtgctattttgtttggttggctggtttgggttttgattcggataaactgagagcatagtttcagttatttctaggctcacttcccctttatgtaaaatgctccagttaatttattgttttttaaaacaaggaaataattttctcaatcaaaacatactgcattacaatgagggaagcctctgagcaaacagaagagcaggaacaagatagtcattcaaaccccaaagccaagatttcaaacaattatctcactaaaggaaggctgacaaaattatcaaaagctccccaggggatttggcctaccccattgttcagaactgtgcctcagtttccttatctataagatgttggtgatccaaaatataacgtcacacgtgttatggactggtgaagagaaattttacacacataccacaaacataaaaaaagttcccaatttatgtagccaaagataataaaatttaccagaagtgggatgaccttctaagcaggagctaaatttggtatcttaaaatgaaattccaactcattcttctgtcttgcctgttcttgaatccaaaatggagattagaaccaagagcaattatcattccatgtcctctatttcaaagtgagaagtttggggcacaaggcaaatgccatgccttgagacacttggctgtcctgctgagaacaaggactcaaaacctttacatgaggactcactccttgccccagtcttccctcatactatcctagttgcatactgggatccaggaattcccagaatcacccatttttactcctcctgatttttcttaatgaaaatactagagccacacaaaactataagagctcctgagatgacaacttacagcctggaaatccctgccctgctacagaaggattgatgttaagcacaagccaccacgtggcctattggaagatattgctacttgctgaaaacctccaatggaaaaggttagactctggctactctttgtggaacgccacaccagagtattagtatcttagtcatttcatgcctctaaacactggttttaaatggttgccatggtgatcatcatgatgatggaaataccctaaataagtgtttgaatacaactctcaccagtgctgtttctgtgttgtcaagagccataaatatcacagcagactcctgggtgacgttttcatcaatttgcaatgttagtactctgtgctgtgttggggagaggctcctcagagatcgatttcttacaacctacatgctgattggtcctttataaagtactgagaatacagtagtgatgaaagtttgtcccctgatgataggaacttaaactcaaagcctgcagctccatgaatgatggcaagcactgtgaattagtagaggaatagccttcatggacagtatcacaatggatgtatgtgcagttagtgacctttaagtccaaggcaggcaatatcttaatacactcacacacattggaagaaaagcttttcttatagttttcaattgatcttttttctggcaatctgaaagacaaagactgtggacctcctcccttagttctttcaatatgacttcagtggtgccattgtggctataatctaagaaaacttacacctcttcctagggatttggctcttgagtatgatcttcctataattttttttcaccagaaatagctgtcctgcctagcatctaacatatggtattcttttttcttacatgcatgagttatcagagacaaaaatgataaagaataaactgtgccacatggtttttccctaacataacattctctcacaacctcctagagttggtaggttacatttggatgcattgcttcaagagttcaaatgggaatcttggccaagaattctttgaactggaacttgcattgtttttcaagcaagctctaagtgagtagtcttcctggtgattcaaaaatcagagtggcaggaattagttttgtattggataccaagctaatatagtttagtcagttggtctgtatcagccaatacatatttgacttcgtgccgctagttttatgtcacttgacacaaattagagccatctgaagagaagatacctcaatggagataatgtctccattagatcaggctgtaggcaagcttgtagggcatttgtttaattggtgatggattagggagggcctagcccattgtaggtggtgtcagtcctagcctgatgttcctggatgccgtagcaatgcaggatgagcaaggcatgatgggcacaccagtagacagcacttctccatggcttctgcataacctcttgtctccaggtcctacctggtttgagttcctgtctaggatttcctctgtaaattaaagatctgtgacttcagatctaaatatgtgccaaataaatcctttcttcttcaagttgcctttggtcgtggtatttcattatagccgtagaaatatacttagttcaaacagttaacaatgttgtctttttagagcacataaggcaggtgacagaatatcatcaagcatggttaatttttttgttaaaacagtttcattttatttatttgtatttta

SEQ ID NO: 129 - DNA, 5433 bp, Rattus norvegicus
caggcagcaacagccggtggcacagcacagaagccgcctctgctgatagagaatggcccgcagcccgggtgagcctgctgtagccttctccctgactcagactccaccccatccctggctcagctgagtgtcagcggggccttctgcttcccctggaggcaggcaggacctgaccagactgtcctgggaagtgacgatgggccttactcaaaggggggaaaggacacagcggggactgatggggccctggtgtgccgccgccagagcattccagaggagttccggggcatcaccatggtggagctgatcaagcgtgagggcagcactctgggcctgactatctcaggagggactgacaaggacgggaagcccagagtctccaacctgagacccgggggccttgcagccaggagcgatctactgaatgtgggcgactatatccgctcagtgaatgggatccgtctgacccggctccgacatgacgagatcatcacattgctgaagaatgtgggcgagcgcgtggtgctggaggtggagtatgagctgcccccgcccgctcccgaaaacaacccgaggatcatttccaagacggtggacgtctccctctacaaggaaggcaacagttttggctttgtcctcagaggaggtgcccatgaggacctgcacaaatcccgcccattggtcctgacttacgtgcggcctggtggcccagcagacagggagggttccttaaaggtgggcgacaggctgctcagcatagatgggatcccactgcacggggccagccatgctaccgcaatagccaccctgcagcagtgcagccatgaggccctcttccaggtggagtacgatgtggccaccccagacacggtggccaatgcttcaggccctttggtggtagaaatagccaagaccccaggatctgccctggggatctctctcaccactggctcccaccggaacaaaccagctatcactatcgaccgcatcaagccggctagcgtggtggacaggagtggtgccctgcatgctggagaccacatcctggccatcgatggcaccagcacagaacactgctctctggtcgaggccacgaagctcttggccagtgtgaccgagaaagttcgactggagatcttgcctgcaccccagagtcggcggcccctgaagcccccagaggcagtgagaatacagaggagtgagcaactgcaccactgggacccctgtgttccctcttgccatagcccaaggccaagccactgcagggcacccacctgggcacctggaggccaggaccagagccgatccgtgtcctcgactcccttctcctcgccaactatgaaccctgcctttccctgtgccaacgccagcaccctgcccagaggacccatgagccccagaacaacagcggggaggagaaggcagcgaaggaaagaacacaggagctctttgtcactggcctccagcacggtagggcccggtgggcagatcgttcacacggagacgacggaggtagtgctctgtggagaccccctcagtggcttcggcctccagctgcaggggggcatttttgctaccgagaccctgtcctccccacccttggtgcgatttattgaacctgacagccctgctgagaggtgtggtctgctgcaggtgggggaccgcgtcctagccataaatggcattgctactgaggatgggaccatggaggaagccaaccagctgttgcgggatgctgcactggcccgcaaagttgttttggagatcgagtttgatgtggcggagtctgtcatcccaagcagtgggaccttccacgtgaagttacccaaaaggcgtggtgtggagctgggcatcaccattagctcggccagcagaaagcgaggggaacccctgatcatctctgacatcaagaaaggcagcgtggcgcacaggactggcaccctcgagccgggcgacaagctgctggccattgacaatattcgcctggaccattgccccatggagtatgctgtgcaaatcctgcgccaatgtgaggacctggtgaagctgaagatccggaaggacgaggacaactcagatgagcaggagagctcgggcgcagtcagctacacagtggaactgaagcgctatggcggacccctgggtatcaccatctccggtacagaggaaccttttgaccccatcatcatctctggtctcaccaagcggggtctggctgaaaggactggagccatccatgttggggaccgcatactggccatcaacagcgtgagcctcaagggccggcccctgagtgaggccattcaccttctgcaggtggcaggggagactgtcacactgaagatcaagaagcagctggaccgtccccttctcccccgccagtcaggcagcctcagtgaggccagtgatgtggatgaggacccccctgaggccctcaagggaggcttgctgacaacccacttctcacctgctgtacccagcgtggacagtgctgtggagtcctggggcagctctgccacagagggtggctttgggggctcaggctcctacactccgcaggtggcagtccggagtgtgactcctcaggagtggcgttccagcagactgaagagtagccccccaccccttgagccccggaggacgagctacacaccgggccccactgacgaaagcttcccagaggaggaagagggggactgggagccaccaatgaggcatcctgtgtcaccgctctccaccccgtctcatctgcccctgttctaattggctaccaacagtcttggtcgcccctaactgcgtcttccccaccccattctgtgtcaccaaccactgcccagcactgggccctgggcaacgaagactcctcaggcccagcccacccaccctcccacctgccaggagttgacgctgtggttcctgttgcagcccagcccctggccccgcccgagaggagggcttctggagagtgcttggagaggcccttgaagacctggagtcctgtggtcagtctgaactgctaagggagctggaggcttccatcatgacaggcactgtacagtcggtagctgtggatggcaggcctggctctcggccctggcgccggagccgggaagtcggaacatccccggaagacctgcaggagctgctgttgccaacgcccctggagatgcacagggtgaccctgcacaaagacccggtgaggaacgactttggtttcagtgtctcagatggcctcctggagaagggtgtctatgtccacatgtgcgcattgatgggccagctcagcacggaggcctgcagccctttgaccgtctcctgcaggtcaaccatgttcgcactgggacttcgattgctgtctggccgttccactactggcagaggtggggacatccttgagctggtggtcagccgaaaccatctggcacagagccgcagacaccagagcaccgggccccagtagtccccagatgatctgaggtcattatgtaagtcagctggcggagtgcccccagtcatcgattatggcctgcagattcacatccggtagagtggcatcttcaagttgggtcttcaggatgctcagagaaccccacaggaaaggggtcatccctgctgctcagctaggagagcccagctccctgtgcagtcatctcagagcagcgaacagagtggggacggcccactccgtgtggtaatggatgatgccagtatttcccattgggaagttaataagctgtaggtcgacaattctgctctgtggaaagaggcatttggcgacccagctgttcagatggtacccagtgcacagggaccctgccaccgggaaagatatggcacaagaacagtgtcctcccttctcccaaatggtggtgttttgagagcctccagcacctagtgaccatactgaggaaccccaattagggacaatctagggtgccagagaatgcttgccccttcctttgggttggtctttcaattatttcacgggtgattctgaacctcagagcagaactgtggccatcaaccctcctgtcccacaaaaccttagcccaagtccttgcccagaggagggcacagctcgggtcaaacggtccaggagcatccacacacctgccattccagcacatatggtaaaccttgggaagagactgagccacagttctgcccctgaccccatcagaggaagagaggaagaggaaaggagctgacatggagggaggtcagctgaaggatgagagagtggctaactggagcagtgtccaaggaggctattcaaggaggtccccagcatcccttaactctgggctcctccatctctgctaagcagaacccttccagcttcaagcaagactcaagacacttccttcccagcagtctgagctgttctggagactggcttcatgtttgcccagcttaaggtctcaaggacctgcgggaagcctccaaccctgccctgtcacccctctgtgcccttgaagctcactgctagaaagcactccctgttcaagaggacagatgaggtcccagaagccattctttccccgttctcttcttggctgtataaccttgagtaaagctgaaaagacacagggcgagctccagctgcccactaagacacttcagctctctgcttttcctagcttcccccatatcctgcccttcatgatggcttccccagggacccttcaggcaacccagtgactctactttcactgccccagggtagaaagatactacccacccatcatgggcaccaaacaaagaccttcagcttcactagcagagaagtgactcctagccaccagctcacctgatcctgtgtgaccttgggcagatggctcagcctctggatttctggtgtgtggcataactgactgtaccctgaaggcctcttagcttgggaaatctgtgttccacttaatgactccaggctctgaaaatgcaacccctcgaccactgccctcccctcgggctgaggctctcccatcctcccagacgtatgcaactaggccaagcgggtggacctcctggctgtggcctgaggccttctcatatgcaatatacccccctggcttctcacaggggtgtttgccccacacaacatccctagcccccaccccagtgagcatcctgcctgcctatgcattttgggtacctcccctgtgacacccacccccagagctgtatttttctctggctaagattagaacatattccttgtaaagtatttttctatgcgggttttcttagggctcccaggaagcacccagcacacccatggccccactgtacaggttgtttctggtctgtctggggcccacctataaatctttgtcccaccaggcatcacagtgactggggggaggttgagtgctattggggtgattttttttaaataaaattggttaaatgaaaaaaaaaaaaaaaaaaaaa

SEQ ID NO: 130 - DNA, 1947 bp, Rattus norvegicus
gggctagaggcgcgggttgaaaagtctcgttccaagtttggagagagggagagagaggagagcgtctcagacctcgctacccgcaagcggggaggaggcagaagagaagatcgcggcgtctggggagcacccagacagccagaccgagctcaggctttccgagctaggagtgcgtgacgtgcctgggagaggcaggagcgcctgcgatcgggctgctcttgactagcgagagaagtccgaggcggcaaaggggggcgaacgacccgacgcaagatggcgagtaaagagatgtttgaagatactgtggaggagcgtgtcatcaacgaagaatataaaatctggaagaagaatacaccgtttctgtatgacctggttatgacccatgctcttcagtggcccagtcttaccgttcagtggcttcctgaagtgactaaaccagaaggaaaggattatgcccttcattggctagtgctgggtacccatacatctgatgagcagaatcatctggtggttgctcgagttcatattcccaatgatgatgcacagtttgatgcttcccattgtgacagtgacaagggagaatttggtggctttggttctgtaacaggaaaaattgaatgtgaaattaaaattaatcatgaaggagaagtaaatcgcgctcgttatatgccacagaacccacacatcattgccacaaaaacaccatcttctgatgttttggtttttgactatacaaaacaccctgcaaaaccagatccaagtggagagtgtaatcctgatcttagattaagaggtcaccaaaaggaaggctatggtctctcctggaattctaatttgagtggacatctcctgagtgcatctgatgaccatactgtctgcctctgggatataaatgcaggaccaaaggaaggcaaaattgtggatgctaaagcaatctttactggccactcagctgttgtagaggatgtggcctggcatctgctgcatgagtccttgtttggatctgttgctgatgatcagaaacttatgatatgggacaccagatccaatactacttctaagcccagccatttggtggatgcacacactgcggaggtcaactgcctctcattcaatccctacagcgagtttattctggcaactggctctgcagataagactgtagctttatgggacctgcgtaatctgaaactaaaactccacacctttgaatcccataaggatgaaatttttcaggtccactggtctccacataatgaaactattctggcttcaagtggtactgatcgccgcctgaatgtgtgggatttaagtaaaattggagaagaacaatcagcagaagatgcagaggatgggcctccagagctcctgtttattcatggaggacacactgccaagatttctgacttcagttggaaccccaatgaaccttgggtcatttgctctgtgtctgaagataacatcatgcagatatggcaaatggctgaaaatatttacaatgatgaagagtcagatgtcacgacatcggaactggaggggcaaggatcttaaacccaaagtatgagttgtttctattgaatgtattgctacacgaatgcttgatttgtcaagcgccaaaaaggcattgtatagtaggaaatgtaagtgggatggcttctggcattctttaccctctgattctagcactttcaagtgagctgttgcgtactgtatcatattgtagctattaggggaacaaaaaggaatgttgcttaagaatggacatcattgttttaaacacacattgctgggtattgcctttgattcaactgtcattttctcaaacttttaagtgcttgctcaagttcccaaatatgcgaggataacttttacactttttccttccaacacttcttgattggctttgcagaaataaagtttttaaaaaaaaaaaaaaaaaaaaaaaaa

SEQ ID NO: 131 - DNA, 966 bp, Rattus norvegicus
atggagaacatagcctgtaatgggtcaggggactctcagaccagcttctaccttataggcatcccctctctgcaaaaatccctcttccttcctgtcttcttcatctttctcctcctctaccttctcatcctcatggggaacactctgatcctggtagctgtggtggccgagcccagcctccacaagcccatgtacttcttcctaatcaacctctcagctctagacatcctcttcaccaccaccactgtcccgaagatgctgtccctactcctgctgggagaccgcttgctcagcttccctgcctgcttcctgcagatgtatctattccacagcttctcctgctcagaagccttcatcttggtggtcatggcctatgaccgctatgtggctatctgccgccctctgcactaccccgtccacatgaccccacagacaaacactgcactggcagccagtgcctggatcaccgccctcctcctgcccatcccagcagtggtacagacttcccacatggcatttgacaacatcgcctacatctaccactgcttctgtgaccacctggccgtggtccaggcttcctgctcagacaccagtccccagacgctcatgggcttctgcattgccatggtggtgtctttcctccccctcctcctggtgctcctctcctatgtgcgaatcctgatctcagtgcttcggatcaactccaaggaagggcgttccaaagccttctccacctgcagctcccacctcctggtggtgggcacctactactcgtccattgccatatcctatgtggcctacagggctgacctccccgtagacttccacatcatggggaacgtggtctatgccattctcacacctgttctcaaccctatcatctacaccctgaggaacaaagatgtcaaggcggccatcactaaaattgtctgtcaccaggatccaaagagtattggaaagccctag

SEQ ID NO: 132 - DNA, 957 bp, Rattus norvegicus
atggctgtgggaagaaacattagcatggtgactaatttcatccttttgggatttttagagcatccacagctgcagattgtcctcttcgtgttgtttctggggatctacctggtgaccttgactggaaacttgggcctcattgtcctgatcagaatggactcacacctccactcccccatgtacttcttccttagtaatctgtcctttattgatgtctcatatacctccaccatagcccctaagatgctctgtgacttttttagggagcagaagtccatctctttcataggctgtgctatacagcttttcttctttattggaatgggaggcactgagtgctgtctcctggcagccatggcatatgacagatacgctgctatctccaaccctctactttatccatccctcatgtcacccaccatccgtgtaaggatggccatcacagtatacacaggagggttcctcactggcttgatccaaaccagctccatattccagcttcatttctgtggctctcgggtcattaatcattttttctgtgacttgccacccctgatgtccttgtcttgctccagcacttttttcagccaagtagtgaacttcctggttgtgtgtgtggttggtggggcatcagcgctggttgtcttggtctcttatagctacatcattgctgctgtcatgaggattcattcaacccgtgggcagatgaaggctttcaacacctgtgcctctcatctgactacagtgatccttttttatggctctggtctcttctcataccttcattctaatgttggatactcacaggacaaaaataaggtggtgtccatgttctatggggcagtgattcccatgttgaacccgatcatatatagtttgagaaacaaggagatcagagaagcattgaagaaactcaagaagaggaagaagcagatgtcctgtctctgtgctatgtag

SEQ ID NO: 133 - DNA, 942 bp, Rattus norvegicus
atgagcagcaccaaccagtccagtgtcaccgagttcctcctcctgggactctccaggcagccccagcagcagcagttcctcttcctgctcttcctcaccatgtacctggccactgtcctgggaaacgtgctcatcatcctggccatcagcacagactcccgcctgcacacccccatgtacttcttcctctgcagcctgtcctttgtggatgtctgcttctcctccaccactgcccctaatgtactagccaaccatatacttgggagtcagaaaatttctttctctgggtgtctcacccagctgtattttctctgtatctttggtgacatggacaatttcctgctggctgtaatggcctatgaccgatttgtggccatatgccaccctttacgctacacaacaaaaatgacccatcaggtctgtgcccttctcgttatggggtcatgggtggtagccaacatgaattgtctgttgcacatactgctcatggctcgactctccttctgtgcagacaacatcatcccccacttcttctgtgatgtgactcctctcctgaaactctcctgctcagacacgcatctcaatgagctgatgattcttacagagggagctgtggtcatggtcaccccatttgtctgcatcctgatctcctacatccacatcacctgggctgtcctgagagtctcatcacccaggggaggatggaaagccttctccacctgtggctcccacctgactgtggtctgcctcttctatggcacagtcatcactgtgtatttcaacccctcaacctcttactcagctgggagggatacggcagctgcagtgatgtatacagtggtgaccccaatgctgaaccctttcatctacagcctgagaaacagggacatgaaagtggctttaaggaaagtgctcgccatgagatttccatctaagcagtaa

SEQ ID NO: 134 - DNA, 945 bp, Rattus norvegicus
atgacagaagagaaccaaactgtgatctcccagttccttctcctgggcctgcccatcccctcagagcaccagcacgtgttctacgccctgttcctgtccatgtacctcaccactgtcctggggaacctcatcatcatcatcctcattcacctggactcccatctccacacacccatgtacttgtttctcagcaacttgtccttctctgatctctgcttttcctctgttacgatgcccaagttgttgcagaacatgcagagccaagttccatccatcccctttgcaggctgcctgacacaattatacttttacctgtattttgcagaccttgagagcttcctgcttgtggccatggcctatgaccgctatgtggccatctgcttcccccttcattacatgagcatcatgagccccaagctctgtgtgagtctggtggtgctgtcctgggtgctgaccaccttccatgccatgctgcacaccctgctcatggccagattgtcattctgtgcggacaatatgatcccccactttttctgtgatatatctcctttattgaaactgtcctgctctgacacgcatgttaatgagttggtgatatttgtcatgggagggcttgttattgtcattccatttgtgctcatcattgtatcttatgcacgagttgtcgcctccattcttaaagtcccttctgtccgaggcatccacaagatcttctccacctgcggctcccatctgtctgtggtgtcactgttctatgggacaatcattggtctctacttatgtccgtcagctaataactctactgtgaaggagactgtcatggccatgatgtacacagtggtgacccccatgctgaaccccttcatctacagcctgaggaacagagacatgaaagaggcactgataagagtcctttgtaaaaagaaaattaccttctgtctatga

SEQ ID NO: 135 - DNA, 942 bp, Rattus norvegicus
atgagcagcaccaaccattccagtgtctcagtgttcctcctcctgggactctccagtcagccccagcagcagcagctcctcttcctgctcttcctcactatgtacctggccactgtcctgggaaacctgatcatcatcctggccatcagtatagactcccacctgcacacccccatgtacttcttcctcagcaatctgtcctttgtggatgtctgcttctcctcctccactgtccctaaagtactggccaaccatatacttgggagtcaggaaatttccttctctgggtgtctcacacagatgtattttctctctgtgtttgctgatatggacaattttctgctggctgtgatggcctatgaccgatttgtggccatatgccaccctttacactacacagaaaagatgacccgtcagctctgtgcccttcttgttgttgagtcatgggtggctgccaatctgaatgctcttttacatacactgctcatggctcgactttctttctgtggggacaacatcatcccccacttcttctgtgatgcaactcctctcctgaaactctcctgctcagacacacacctcaatgagctgatgattcttactgttgcagggctgatactgttagccccatttgtttgtatcctcatgtcttatattcttatagcttgtgctgttgtgagagtttcctccacaggaggaagatggaaagccttctccacctgtggctcccacctgactgtggtttgcctcttctatggcaccatcatcgctgtgtatttcaaccccgcatcctctcattcagctgggagggacatggcatctgccatgatgtacacagtggtgacccccatgctgaacccgttcatctacagcctgaggaacagggacatgaaaggtgctttaaggaaagtgctcaccatgagatttccatctaagcagtaa

SEQ ID NO: 136 - DNA, 663 bp, Rattus norvegicus
ggcaacatgtcctttgctgacatctgtttcacatccacgactgtcccaaagatgctggtgaatatccaaacacaaagcaaaatgatcacttttgcaggctgcctcactcagatattttttttcattgcatttggatgcctggacaatttgctcctgaccatgacggcctatgaccgcttcgtggccatctgttaccccctgcactacacggtcatcatgaacccccggctctgtggactgctggttctggggtcctggtgcatcagtgtcatgggttccttgcttgagaccttgaccattttgaggctgtccttctgcacaaatatggaaattccgcactttttttgtgatccttccgaagtcctgaagctggcctgttctgacaccttcatcaataacatcgtgatgtattttgtgaccattgtcctgggtgtttttcctctctgtggaatcctattctcttattctcagattttctcctccgtcctaagagtatcatctgccagaggccagcacaaagccttttccacctgtggttcccacctcacggtggtcagcttgttctatggcactggccttggggtctatctcagttctgcagttacaccaccttctaggacaagtctggcagcctcggtgatgtacaccatggtcacccccatg

SEQ ID NO: 137 - DNA, 2621 bp, Rattus norvegicus
atggcaatccagttccgctcactcttccccttggccttgcctggaatgctagcactccttggctggtggtggtttttctctcgtaaaaaagatcggctcagcagcaatggcaagcaggtggggacattgaaggttggccctgccatcgaggaccgactgcccactgaagaggcctgtcctggagtcctgtctgtgacccccagtgtcacacagcctcctggaaaggaagagcagcgctctatggacaggcctctttcagatcccccagccttgccaaggacccgtcaagttcgccgaagatcagagtcctcaggcaacctccccagcattgtagacacaaggttgcaggcaggacagtgcagcgatgagaattcaaaagtggtactctccctgatgggggacgaagccaaatctattcctcttggacgtccgcttttcccaaaggatctgtccttcccctatgaagcagtggaagggtgtaagcaagagtctgccctgggcagaactcctgggagaggctggctaagccagtgtgcagcctctggagagaacgcgagagagacgggtggggcggaagggactggagatgctgtgttgggggaaagtgtacttgaggaaggcctattgccccaggagtgtgtttcagaagtagagaagagtgagtttccgatcctagctcccgggggaggcgggggagagaaggtgagaagtggcccaccacaggtagatgagcttttaaagaaggaagaatatattgttgggaagttgccaagtagctttgtggggccagttcactcggagctggttaaggatgagggtgcgctggtaccccaagtcaaaggtagccaggacagaagcctggctagagaactggacaaagacaagaccttgcctgaaaaggaccagattgagcagactgccttccagatcatctcccaggtgatcttggaagcgactgaagagatacgggccaccacagtgggcaagactgtggcacaagtgcatccaaccccgggcactcagcctcaggggcaggaggagagctgtgtcccagccagccaggaaactagcttgggacaagaaatcccagatcctgcttccaccagaacaggtgccactgccagcccttcagcaggagccccaccaccaaagacctatgtgagctgtctcagcagtcctctgtcaggccccaccaaggaccagaagccaaagaactctgcacaccacatctccctggctccctgcccaccgccagttaccccccagaggcagtctctggatggggcaagtaacccgagaggtgatgacacctttgtcacctgtacgtccaacaacagccagagtgtcctttcagttacctccttggggctgtgctcagaccctgtcagtacttcgaggcttgaagactcttgcacagagaccatctcaagctccggagacaaagctgtcaccccaccactgccagacagtactgagcccttcagcaatggggtgctgaaggaggagttgtcagacttggggaccgaggatggatggaccatggatacagaagcagatcattcaggaggttctgacgggaacagtatggattcagtggatagctgttgtgggcttacgaaacctgatagcccccagactgtccaggcaggctccaaccctaagaaggttgacctcatcatctgggagatcgaggtgccaaagcatttagttggtcgactgattggcaagcagggacggtacgtgagttttctgaagcagacgtctggtgccaagatctacatctccaccctgccttacacacagaacatccagatctgccacatagaaggctctcagcatcatgtggacaaagctctgaacttgattgggaagaagtttaaggagctgaacctcaccaatatctatgcaccaccgctgccttctctggcactgccttccctgccgatgacatcgtggctcatgctgcctgatggtatcactgtggaagtcatcgtggtcaaccaggtcaatgctgggcacctatttgtacagcaacacacacaccccaccttccacgcactgcgcagcctggaccagcagatgtacctctgttactctcagcctggaatccccaccttgcccaccccagtggaaataacggttatctgcgctgcccctggtgcggacggggcctggtggcgagcccaagtagtggcctcctatgaggagaccaatgaggtggagattcgctacgtggactatggtggatataagagggtgaaagtcgacgtgctccggcaaattaggtctgactttgtgaccctgccattccaaggagcagaagtccttctggacagtgtggttccgctgtcagatgatgatcacttttcacccgaggcagacgcagccatgagtgagatgacaggcaatacagcactgctggcccaggtgacaagctacagtgcgactggccttcctctgattcagctatggagtgtggttggagatgaagtggtgttgataaaccggtcgctggtggagcggggcctggcacagtgggtagacagctgctatgccagcctttgaccgtggctcctgggctgcttcggtcttctttgcactgttgagagtgggtctagaac

SEQ ID NO: 138 - DNA, 2008 bp, Rattus norvegicus
ggaaggcaccggtggggccgacgggcgggctgaggagggaagcgggcgagcgaagtcccagtgcgcgccgcggcggcccgggtaccctccccttccgggcgtgagccgctgagaggaaagccgagcggagcggactcgcataggcagcgaggtgcttctcgggtctcccaagaccggcctcccgcggcttcggcgctccagtcgcggggcccgggttcctcaacacacctagcttcagccaccgtcagagcttgtcccccatccgtcgaagtcccggcggcagcccgggctcttggtggggaggatgacggagctgcagtcggcactgctactgcgaagacagctggcagaactcaacaaaaatccagtggaaggcttttcagcaggtttaatagacgacaatgatctctatcgttgggaagtccttattattggtcctccagatacactttatgaaggtggtgtttttaaggctcatctcactttcccaaaagattatcccctccgacctcctaaaatgaaattcattacagagatttggcacccaaatgttgataaaaatggtgatgtttgcatttctattcttcatgaacctggagaggataaatatggttatgagaagccagaggaacgctggctgcctatccatactgtggaaaccatcatgattagtgtcatttctatgctggcagatcctaatggagactcacctgcaaatgtagatgctgcgaaagaatggagggaagacagaaatggagaatttaaaaggaaagttgcccgctgtgtaagaaaaagccaagaaactgcttttgagtgatgtttattcaatagctagtaacttcacttatttcagggtctccaattgagaaacatggcactgtttttcctgcactctacccacctattgctggacttctgttgtaacaagttggcaaactctggctggaactgggctgcaataaaacatgccagtcattaatgctgacaagagcctaacaagtgccaacttacagatgattacgcattttgaattctaatgaactgttttaaccttcaggaagaattgtaaagacctgtacatagcacaacatgatccggataatatatatactgttcatgtacatccacaaacacaccttgtaccaaataatgctgtcttgtagtagaataagaatcgtgtaaattctaaaagactttagcaggttttcttttcccattcatcgttttttatcagttcaaaaagatttcttaaagcatgtcaggtgaaaaccaataaggattaaaagtttccatataatttcctttaaaccattgagtctttcattacactctttccatttactaatcttttatattttctttgtttttggcacactcccccttccttttatctcttctatctgccagaaagttctcaaatcatttagctaaaatactgaaatactagaaaattacttgattttcacgatgacttcagaggtggggtcatcactaggtgctttgtcctttttgtactctgattcacccatctcttggattggatgtagcaataacattttctggctgttgagagctcttgatcctagtcactatctcctgagaactttaaaaaaaaaaaaagtaaagtctgttctaagttcatcttagtgaaatttattccaaacaatacaaaaatccagatttggttttatttttgcccttaagttgtctgatattaaggttggatgaatatagcatgcgcagctacaggctttctacatctgggattgctattacaaatgctatttgtcctattacccttctccttagcccatatttgtttcttcttacagcagattttcctcacctattgtacaaagaaattgcgatgtatattttcatgtaatttgattttggaattttgtcaccttatgtagtgagttcttccaaaatataatttttttccaataaaaaaaaaaaaaaaaaaaaaaaaaaaaaaaaaaaaaaaaaaaaaaaaaaaaaaaaaaaa

SEQ ID NO: 139 - DNA, 2002 bp, Rattus norvegicus
taggggacgccaggctgactgttgatcatggcttccagccacaatgtgttgatgcggctggtagcctccgcatactctatcgctcagaaggcaggaaccatcgtcaggtgtgtcatcgctgaaggagacctgggcatcgtgcagaagacctcagccactgacctgcagaccaaagcagaccgcatggtacagatgagcatatgctcttccctgtcccggaaattcccgaagctgacgatcatcggggaagaggacctgcctcctggagaagtggatcaagaactgattgaagacgggcagtcggaggagatcctgaagcagccgtgcccatcgcagtacagtgcaatcaaggaggaagaccttgtggtttgggttgaccccgtagatggtaccaaggaatacactgaaggtcttcttgacaatgtaacagtgctcattgggattgcttatgaaggaaaggccatcgcaggcatcatcaaccagccatattacaactaccaggcaggaccggacgccgtgctgggcaggaccatctggggagtcctgggtttgggtgcctttgggtttcagctgaaagaagcccctgctgggaagcacatcatcaccaccaccagatcccatagcaacaagctggtcacagactgcattgcagccatgaaccctgacaacgtgctgcgagtgggaggagcaggaaacaagattatccagctgattgaaggcaaagcctctgcttatgtatttgcaagtcctggatgtaagaaatgggatacttgtgccccagaagttatcttacatgctgtaggagggaagttgacagacatccacgggaatcccctgcagtacgacaaggaggtgaaacacatgaactctgctggagttctggctgcactgcggaattatgagtactatgcaagccgcgtaccagagtctgtcaaaagtgcactcattccctgaaggggtctcacttacttacccaggggcctcggttcaaagtaacatatcttagaactgattaactgattgaacaattagaactccacttgcattcatcattgatcaatgatttattagtaggtagggatagaagatggaattaaagaattgtcttaggtatataacacaattgtcatttctcctgcctaaaaaaaaaaaaattagccaagtggtagcacttatgacagtcatggccattccagtggctgagctaggagggttgcttgagcccagggccccgagactagcctccttcacatagcaagacatagcccaaaaacaaagaagaaaaacaaaaaaggaatttacacttgatcttagccaaaaggccgagaagcgatcaaaaaaggaatttagttttaccaattagctaactagacctgttttgttgttgatgttgttgttgtttggttttttgagacagggtttctctgtgcagtcctggctgtactgaaatttacttagtagacaaagctggccttgagctcagtgattcccctgcttctgcctcctgagggcagggattaagggcttgccccaccatacctggcagaaatgttactgtttttaagtgaagaaatgaaaaagggttagttctgaatgacagtccaggtcatttgtggaatcaacattcctgctggtaaccagatttcttcagggcacagttactccagaatttcagtttgttttcttttcatggtaatgttttaaatttctgattccaaatgagaatgcatataatattatttatgttgatagatttatggggaaagtttgtccaagatacttagtcctatctctttatgttatatatcagatttttttcaaaagtatttgaaaattataaatactgtgaggattaatttattctcttgccattaaaagctatcatcagaaaaaaaaaaaaaaaaaattcctgcggccgcgaattcttccctttagagcacactggcggccgctctagaactagtggatcccccgggctgcaggaattcgatatcaagcttat

SEQ ID NO: 140 - DNA, 4847 bp, Rattus norvegicus
cgccctcggggccgcaacgagcggccgagcttacagaatcggcccctccctctatcccttctggccgtagagcctgtccgaggcccggactcagaacgcggagaacgggttagggtagcggccgggcgtgaggggaccgcacagcatccttgttcccaggacgcgcggaccaagaggaagcgaggggtgtcgggtcctgttcgctgctggagctccaaggtgaccaaggatggcagagaggatatgaccggcggctgccgtcgtctgccctcctagtggcatcaccatgcagaagcccagtggcctgaagccccctggccgaggggggaagcactccagtcccgtgggtaggccctccatcgggtctgcctcatcttctgtggtggcatcggcgagcggctccaaagaagggtctcccctgcacaagcaggcgtcgggcccctcctcggctggagccaccactactgtctccgagaagccaggtccaaaggcagccgaagtgggtgatgacttcttgggagacttcgtggtgggcgagagggtgtgggtgaatggcgtgaagcccggcgtggtgcagtacctgggtgagacacagtttgcgccaggccagtgggccggcgtggtcttggatgatcctgtgggcaagaacgatggagctgtgggtgggctgcgctacttcgagtgcccagctctacagggcatcttcacacggccctccaagctgacccgccagcccgcagctgagggctccggcagtgacggccactcagtggaatccctcaccgcccagaacctgtccctgcattctggcacggccacgcccccactcaccggccgagtcatccccctgcgggagagtgttctcaacagctccgtgaagacgggcaatgagtctggctccaacctctcggacagtggttctgtgaagcgtggtgacaaggacctccacctgggagaccgtgtgctggttggtgggacgaagaccggtgtggtacgatatgttggggagacggactttgccaaaggcgagtggtgtggtgtggagctggacgagccccttgggaagaacgatggggcagtggcaggcaccaggtacttccagtgcccacccaagttcggtctctttgcaccaatccacaaggtcatccgaattggcttcccatctaccagtccagccaaggccaagaagaccaagcgcatggctatgggtgtctcagccttgacccacagccccagcagttcttccatcagctctgtcagctctgtggcctcctctgttggtggccggccgagccgtagtggcctgctcacagagacctcttcacgctatgcccggaagatctcaggcaccacagccctgcaggaggcactgaaggagaaacagcagcacatcgaacagctgctggctgagcgtgacttggagagggcagaagtagccaaggctaccagtcatatctgtgaggtggagaaggaaattgccctgctgaaggcacagcatgagcagtatgttgcagaagctgaggagaagctgcagcgggcacggttgctggtggaaaacgtgaggaaggagaaggtggatctgtccaatcagctggaggaggagaggaggaaggtggaggacctgcagttccgggtggaagaagagtccatcaccaaaggagacttggagacccagacccagctggagcacgcgcgcattggggagctggagcagagtctgctattggagaaggcgcaggccgagcggctgctcagagaattagcggataacaggctgaccacagtggctgagaagtctcgggtgctgcagttagaagaagagctgagcctgcggcgtggtgagatcgaagagctacaacactgcctcctccagtcaggtccaccacctgcggaccacccagaggccgctgagaccctgcggctgcgagagcggctgctgtcggctagcaaggagcaccagcgggacagcaccctgctccaggacaagtatgagcacatgctaaagacgtaccagacagaagtggacaagcttcgggcagccaacgagaagtacgctcaggaagtggcagacctcaaggccaaggtccagcaggccaccaccgagaacatggggctcatggacaactggaaatccaagctggactctctggcctccgatcaccagaaatctttagaagacctgaaggccacgctgaactctggcccaggcgcccagcagaaggagattggcgagctgaaggccctggtggagggcatcaaaatggagcaccaactggagttagggaacctgcaggccaagcatgacttagagacggccatgcatgggaaggagaaagagggcctgcggcagaagctgcaagaggcccaggaggagctggccgggctgcagcagcactggagggcacagctggaggagcaggcagcagcaccggctgagctacaagaagcccaggaccaatgtcgtgacgcccagctacgtgtgcaggagctggagggactggatgtggaataccgcggccaggctcaggccatcgagttcctcaaagaacagatctcgctggctgaaaagaagatgctggattacgagatgttgcagagggcggaagcccagagcaggcaggaggccgagcggctgcgggaaaagcttctggtggctgagaatagactgcaggctgtcgagtccctgtgctcagcccagcacagccatgtgatcgagtccaatgacctttctgaggagaagattcggatgaaggagactgtggagggcctgcaggacaagctgaacaagagggacaaagaggtggcagccttgacatcccagatggacatgctcagggcccaagtaagtgctctcgagaacaagtgcaaatcaggagagaagaagatagactctctcctgaaggagaagaggcggctggaggcagagctggaggccgtgtctcggaagacccatgatgcctctggccagctggtccacatcagccaagagttgctacggaaggagaggagtctgaatgagctgagggtgttgctgttagaagccaatcggcactccccagggcccgagagagacctgagccgtgaggtacacaaagctgaatggcggataaaggaacaaaaactgaaagatgacatccggggcctgcgtgaaaagctgaccgggctggacaaggagaagtccctgtcggagcagaaacgctactccctcattgacccagcttcagcgcccgagttgctgagactgcaacatcagttagtgagcacggagggatgcctgcgggacgcactggaccaggcccagcaggtggagaggctggtggaggccctgaggggctgctcagataggactcagaccatcagcaattccggttctgccaatggtatccaccagccagacaaggcccacaaacaggaggacaaacactgacccccaagggacaccatggaccggccctactcacaccagaagccctgccaggcttcccagcagcgccaccttcaggcaggagccagaactttccctttggagatgagactgtgtttgtaacgataattgtcctcactgccgtggacacatcccacctgaaccccctgccggaccaggaggctcccacagacacggccttccacagagcgcggtacagctgggcccagccctggaggacctctcttgtcccaaggagcttcttgaatttgcggaggctgaagcgatccagttgggcctctcttggctatagcaggctgccccgaggcttgtctgggcacccgggtacttccccatctccctttccttctggtgtcccccaggtcccctgcaggcccctgagaggtggagcagggctcctgcttggacgcgtaacacaccaagaagggcttcagtcttcagaaactagggaggggatgcttgacttcatatgctgatcctctaacacaatggtacaaggtcgcttgggcctctagccagggaagatttgggggtgacaggttccttattcctcgacaccacgctagtatgcgttacccacttcccctctgctgcccagaaagcattgagcagacagcttcagtattaggtgagctcgcaaacccactcttcttaccttgaccttgagctgggactggctcaggggcttacagccaagagcgggaagaaaactctttaaacaaagcattcacgcggtgttttgctgggtgagaggaatcacgctggttccctttatttccgggaacccctgccatgttactccaaagaccccagcaacccacagagggtcctgcttctatcttcccagggcgggaaccacagtgggtgacaggtatggtaagtccttaggattggcccaggtggcctctgtgagcaccattagacaccagcaggtgcggtcacgctcttgtccttagggagaagctgaattagcagccccacagcccaaccccctgcttcctgttggcttttgggtagcacttgccgttaacaacagcagcctagagcctagaattgacgctttagtggcccaactgcagagccagtatatcgctctttccagcacaatcgggcagctcacagattaggaattaacagccaaaggctcccacagtagggaccagacggggctgagccccaccctggagtgggcttgcacctggtaggtgtgcaagaagccatttccccataagcactggcctttgacggccccctcagcctacccggtgtggccacccagtggtggctcagccattccctcccctccccctcccctcagtggaattgtggaagtgtggcaagtccatgttcggacaataaagcttgtgattaaggtaaaaaaaaaaaaaaaaaaaaaaaaaaa

SEQ ID NO: 141 - DNA, 3731 bp, Rattus norvegicus
atcctgcgcgcctccgggcgctcctgtgtggcccgacccgtgtcgccggttcctgaagcaggcgacgggaacaagatgtgaactgtttttcctccacagaagaagaggcccttctttcccctcccgggaaggccgatgttctgaaaaaggctgtggatgggaatggcttgccttacaatgacagaaatggagggaacctccacatctcctgcacatcagaatggtgatattcctggaaatgctaactctgtgaagcagacagagccagtccttcaagtgtacctgtaccattctcttgggcaagctgaaggagactatctgaagtttccaaatggagagtatgttgccgaagaaatttgtgtggctgcttctaaagcatgtggtattacgcctgtgtatcataatatgtttgctttaatgagtgaaacagaaaggatctggtatccacccaatcatgtcttccacatagatgagtcaaccaggcataatatactctacagaataaggttttactttcctcattggtactgcagtggcagcaacagaacctataggtacggagtatctcgtggggctgaagctcctctccttgacgactttgtcatgtcttacctttttgctcagtggcggcatgattttgttcatgggtggataaaagtacctgtgactcacgaaactcaggaagaatgtcttggcatggcagtgttagacatgatgagaatagctaaggagaaggaccagactcccctggctgtctataactccatcagctacaagacgttcttaccgaagtgcgtgcgagcgaagatccaggactatcacattttaactcggaagcggataaggtacagattccgcaggttcattcagcagttcagtcagtgcaaagccactgccaggaacctaaaacttaagtatctcataaacctggagaccctgcagtctgccttctacacagaacagtttgaagtaaaagaatctgcaagaggtccttcaggtgaggagatttttgcaaccattataataactggaaacggtggaattcagtggtcaagagggaaacataaggaaagtgagacactgacagaacaggatttacagttgtattgtgattttcctgatattattgatgtcagtattaagcaagcaaatcaggaatgctcaactgaaagtagagttgtgaccgtccacaagcaggacgggaaggtcttggaaatagaacttagctcattaaaagaagccttgtcatttgtgtcgttaattgacgggtattacagactaactgcggatgcacaccattacctctgtaaagaggtggctcctccagccgtgcttgaaaacatacacagcaactgtcacggcccaatttcaatggattttgccatcagcaaactaaagaaggcaggaaaccagactggactgtatgtacttcgatgtagccctaaggacttcaacaaatacttcctgacctttgccgttgagcgagaaaatgttattgaatataaacactgtttgattacaaagaatgagaatggagagtacaacctcagtgggactaagaggaacttcagtagtcttaaggaccttttgaattgctaccagatggaaactgtgcgctcagacagtatcatcttccagttcaccaaatgctgtcctccaaagccgaaagataaatcaaaccttcttgtcttcagaacaaatggtgtttctgatgttcagctctcaccaacattacagaggcataataatgtgaatcaaatggtgtttcacaaaatcaggaatgaagatttgatatttaatgaaagccttggccaaggcacttttacaaaaatatttaaaggtgtaagaagagaagttggagattatggtcagctgcacgaaaccgaagttcttttgaaagtcctagataaagcacatagaaactattcagagtctttctttgaagcagcaagcatgatgagtcagctttctcacaagcatttggttttgaattatggagtatgtgtctgtggagaggagaacattttggttcaagagtttgtaaaatttggatccctggatacatacctgaaaaaaaacaaaaattccataaatatactatggaaacttggagtggccaaacagttggcatgggccatgcacttcctcgaagaaaaatcccttattcatgggaatgtgtgtgccaaaaatatcctgcttatcagagaagaagacaggaaaacagggaatccacctttcatcaaacttagtgatcctgggattagcatcacagttctaccaaaggacattcttcaggagagaataccatgggtaccacctgagtgcattgaaaaccctaaaaatctaactttggcaacagacaagtggagctttggcaccactctgtgggagatctgcagtggaggagacaagcctctgagtgctctggactctcaaagaaagctgcagttctatgaagataagcaccagctcccagcacccaagtggacagagttggcaaaccttataaatacttgcatggattatgagccagacttcaggcctgccttcagagctgtcatccgtgatctgaacagcctgtttactccagattatgaactgctgacagaaaatgacatgctacccaacatgagaataggtgccctaggattttctggtgcttttgaagacagggaccctacacagtttgaagagagacacttgaaatttctacagcaacttggcaagggtaactttgggagtgtggagatgtgccgctatgacccgctgcaggacaacactggagaggtggtagctgttaagaagctccagcacagcacggaagagcatctccgagactttgaaagggaaattgaaatcctgaaatccttgcagcatgacaacatcgtgaagtacaagggagtgtgctacagtgctggtcggcgcaacctaagattaattatggaatatttgccgtatggaagtttacgagactatctccaaaaacataaagaacggatagatcacaaaaaacttctgcagtatacatcccagatatgcaagggcatggagtatcttggtacaaaaaggtatatccaccgggatctggcaacaaggaatatattggtagaaaatgagaacagagttaaaataggagattttggattaaccaaagtcttgccacaggacaaagaatactacaaagtaaaggaaccaggtgaaagtcccatattctggtatgctcccgaatccttgacagagagcaagttttctgtggcctcagatgtgtggagctttggtgtggttctgtacgaacttttcacgtatatcgagaagagcaaaagcccacctgtggaatttatgcgaatgatcggcaatgataaacaagggcagatgatcgtattccatttgatagagctactgaagaacaacggaagactgccgagaccagaagggtgcccagacgagatttatgtgatcatgacagaatgctggaacaacaatgtcaaccaacgtccctctttcagggacctttcccttcgggtggatcaaatccgggacagtatggctgcatgaaagaggtgacctttactcagagaccaagtagacttccagaaccagagcaaagctctgtagccacatggccatggactcgtgtccacgggcccttatcatgatgctagccagaaggaaatgtgatgctgtctgctcaagactttggaagcgttgtggatttttatgtaccatctgta

SEQ ID NO: 142 - DNA, 2157 bp, Rattus norvegicus
atgagggctgtactggagacagcagacattgccatagtggccctgtattttgtcctggtcatgtgcattggtttctttgccatgtggaaatctaatagaagcactgtgagtggatacttcctggccgggcgctctatgacctgggtggccattggtgcctctctgtttgtgagcaatattgggagtgaacacttcattgggctggcaggatctggagcagccagtggatttgcagtgggcgcatgggagttcaatgccttgctgctcttgcaacttctgggatgggttttcatccctatttacatccgctcaggggtgtacaccatgcctgaatatttgtccaagaggttcggtggccataggattcaggtctattttgcggccttgtccctgctcctctatatcttcaccaagctctcggtggatctgtactcaggggccctctttatccaggagtccttgggttggaacctttatgtgtctgtcatcctgctcattggcatgactgctctgctgaccgtcactggaggccttgttgcagtgatctacacagacactctccaggctctgctcatgatcattggggcactgacacttatggttattagcatgatgaaggttggagggtttgaggaagttaagagaaggtacatgttggcctcacccaatgttgcttccattttgttgacacacaacctttccaacacaaattcttgtatggtgcatcctaaggcagatgccctaaagatgttgagagatccaacagatgaagacgtcccatggcctggattcattcttgggcagaccccagcctcggtatggtactggtgtgctgaccaagtcatcgtgcagagggttctagcagccaaaaacattgctcatgccaaaggttctactctgatggctggcttcttgaagctcctaccaatgtttatcatagtcgtacccggaatgatttccaggatactgtttgttgatgatatagcttgcatcaacccagaacactgcatgcaagtgtgtggaagcagagctgggtgctccaatattgcttacccacgcctggtgatggagttggttcccgtgggccttcggggcctgatgatggcagtgatgattgcagctctgatgagcgacttggactccatctttaacagcgccagtaccatattcaccctcgatgtgtacaagcttctccgcaacaatgcaagctcgcgggaactgatgattgtgggcaggatatttgtggcttttatggttgtcatcagcatagcatgggtgccaattattgtggagatgcaaggaggccaaatgtacctttatatccaggaggtggcggattatctgacccctccggtggcggccctcttccttctggcaattttctggaaacgttgcaatgagcaaggggctttctatggtggaatggcaggttttgttcttggagctatccgtttgatactggctttcacctaccgtgctcctgagtgtgaccaacctgataacaggcccagcttcatcaaagacatccattatatgtatgtggctacagcattattttggatcacaggactcattactgtaattgttagtcttctcacaccacctcccacgaaggatcagattcgtaccactaccttttggtcaaaaaagactgtggtgacgaaggagagttgctctcagaaagacgaaccatataaaatgcaagagaagagtattctgcgatgcagtgagaatagtgaagtcgtcagccacactattcccaatgggaagtctgaagacagcattaaggggctccaacctgaagacgttaatctgctggtgacatgccgagaggagggcaacccagtggcttccatgggtcattcaggagcagaaacaccagtagatgcttattccaatgggcaagcagctctcatgggtgagagagcgcgagagaaggaaacagaaagtagaagccggtattggaagttcatagactggttttgtggctttaaaagtagaagcctgagcaagaggagcctcagagactcgatggacgaggaggccgtttgtttgcagatgttagaggagaccccacgagtcagagtgatcctaaacattgggctttttgctgtgtgttcactcgggattttcatgtttgtttatttctccttatga

SEQ ID NO: 143 - DNA, 3520 bp, Rattus norvegicus
cagggtgacttcttggatcctccacgtttccaggtcctagtgaaaaccggtggacccagctggaggcatggaccgatcagctgggctccctgtgcggctgctattgctgctgctgttgttgctgctgtggtccgtggccccgcaggcgctgcggcccggttcacattctctacgatatctcttcatgggtgcctcaaagccagacctcgggctgcctttctttgaggctctgggttatgtggatgaccagctctttgtatcctacaatcacgagagtcgccgtgctgagcccagggccccatggatcttggggcagacatcaagccagctgtggctgcagctgagtcagagcctgaaagggtgggattacatgttcatagtggacttctggaccatcatgggcaactataaccacagtaaggtcacgaagttgagagtggtgcctgagtctcacatcctgcaggtgatcctaggatgtgaggtgcatgaagacaacagtaccagtggcttctggaaatatggctacgatgggcaagatcaccttgaattctgccccaagacactgaactggagtgcagccgagccaagggcctgggccaccaagatggagtgggaagagcacaggatccgtgccagacagagcagggactacctgcagagggactgcccccagcagctgaagcaggtcctggagctccagagaggggttctgggacagcaagtgcctactttggtgaaagtgactcgccactgggcctctacagggacctctctaaggtgtcaggctctgaatttcttcccccagaacatcactatgaggtggttgaaggacagccagcccctagatgccaaggatgtcaaccctgagaacgtgctgccaaatggggatgggacctatcagggctggctgaccttggctgtggcccctggagaagagacaaggttcagctgtcaagtggagcacccaggcctggatcagcctctcactgccacttgggagccctcacggtctcaggacatgattattggaatcataagtgggatcaccatttgtgccatcttctttgttggaattctgatcctagtcttaaggaaaaggaaggtttcaggaggaaccatgggtgactatgtcttaacagagtgtgagtgacctgcagcatgcagaagcacagaagagagaagactcagccaaagacttggaggggacacacttgctccattctagaacacagctggacctaacacacagaaactgcctgaggactctgcccttagctttcctgtttgctttcttaaggtgttttctccagttaagttcagttcctgaataatagtgactgccccagctgcaacctctcccttcagaaccagtctcatgatctttaagctgctacttgcaggcatccttcgttttctgcatccacctagacttcgtatgtctacttaaaaagccccactaaatttgggggacacatgattcatttccacatctgaagaagttatgaaccttcatcctgggatgcacacattcttgtgccagaatttttcatacatatcctaggacccattcaattgtcatttgagcctctctatctgttagtgactactctgacttctctgccattggagtgttatggcaataaagctatgaacgttaaaaaaaaaaaaaaaaaaaaaaaaaaagccctagatgggtgattctttttgtttttatcaccctatctcaatgccaaggctcttgtctgttattttccaaatcaataggtaggttctcatctgggtaatgtaggagtagaggacaatggtgagtcttctgtctctggaagtgtctgggaataggatagaggatgaagattctagaaggagcatacctatcatagtatgttggaaagccattggctgcaggatgttcaggaaatgtagaccatacctattttctggatggttaggggctgagcaaaaactactaaactcggagaatcagtactacctttaagcttaaatatatccctgccaggaaggggtaaggctcagaaagctgatagaatgtactcatgtcaacattaagtggtggtgtgctaggtttaaaacttgagtctaggggttggggatttagctcagtggtagagcgcttggcctagcaagcgcaaggccctgggtttggtccccagctccgggggaaaaaaaaaacttaaaaaaaaccttgagtctaattcaagtcttttgtagccttttgtttgtattattttgccttctcaacaaaggaacaccactctgtaatgttttctgtcatcatgtatttaaaatatattttctctactctttttttaaaaaaaacaaaacggtagttttttatggaaaactatcctttctaagtctctttaaatgatgtctaacttaattcactgatttcatcttaagttttgatagacaataatgtattagaaataaaagcatctagattcttgggaacataatcatgccaaaatgaaagaactaaaaccagatgtgtggctcgcaccagtactccaagaactcagaatgctgaagcaggaggatgactatgaagttaagtccagcctgggctgcagactaagaggcagtctcaaagcaaaacaacacaatctgggactctaggtattctaactctaatgtatctcaaggtggcgggtagcgtgtgcatgcacagacagagggtctcccccatataacccagtgtgatcctgaattttttagcccactaattagctttccaagtactgggatcgtggtgtttgctgtcatgcctgactagttctttattcttaaaacaaatttctgggtctttaaaaaatcctttttatacagtaaatctcatcctttttaattttaagttctgtaagtttggacaccttttaacaggggtggtctgccaccataatcaagatagagaatttttatggcattgtctccaaacttactgtgtctcctatagtatagtcctgtccccatcctaagagcctagcaggcacagagctctttcctgttccgtagtatgatgttgtaagtcacacaggagcgtattttatggcattaagcttttagctttttccttctaaaccttacattcacattagatgcggttgtataagctccgataaatggatacagacgagtaatcatgaacagagtacagaagagttctattagtctcccctccaccattcctggtatttcatagtcaaatcttgttctctccctgacattcactgacgtgtgctttcactttatggactgtcttttgaaaagagttgtaagtggaatttaatagtatgtaacttttgagaataatgtgctagaaattagagattttaaatccgtatcactggatgtatcaatagttttgatttctgtttcatatgctattgtgtggatgtcttactgcttattcaaccccaagttggaggacattcgttacagttgaggaggaagttgtgaataaagctgctataaaaccttgaaaaaaaaaaaaaaaaaaaaa

SEQ ID NO: 144 - DNA, 4245 bp, Rattus norvegicus
ggcacgaggaagtggatgcggactgtccttgccactaacttcatcatgctgagggggaggttgagaatccacttgtgataaagacatttttttcctccccaagtgactatacgtttaaattgctaaaacatctgtgcagcaacctagtaaaacataataatcgtatgattgagcaaaaagcctgccaaacaatcgcttgagaggaactttgctgagggagagcaccgagataaagcaactgctgtttgttttgtctagtcaagagagagccaaggcaaccaatattttgtgtttcttttatttcatttgtgaaggattatttgagaaagtgtgtcgaggggaagtttcctgacaggaatttttaaagctgtttattagcagacgagcaagagatcttgaatgtcaaatgcctgacaaactcttgagaccagccaccaaaccacgaaaagtgactttctgagtcttctcttcggcccttctgatggaagcagaagcagggagcaccatggagactggaaaggggaccaaccgaggcattcggattgcactggccctgttcattactggcaccctggtgctgggcacactgctctttctagtgagtcaaggtctcctaagtttccaagctaaacaggagtactgcctgaagccagaatgcattgaagccgctgctgccatcatgagcaaagtaaatctttctgtggatccttgtgagaattttttccggtttgcttgtgatggctggataagcaataacccaattcctgaagatatgccaagctatggggtttatccttggctgagacacaatgttgacctcaagttgaaggcacttctggagaaatcagtcagtcgaaggcgggacactgaagctgtacagaaagccaaaatcctttattcatcctgcatgaatgagaaagcgattgaaaaagcagatgccaaaccactgctccacatcttgaggcattcacctttccgctggcccgtgcttgaagctaatattggtcctgaaggggtttggtcagagagaaaattcagtttactgcaaacactggcaacattccgcggtcaatacagcaattctgtgttcatccgtttgtacgtgtcccctgacgacaaggcatccaatgagcatatcttgaagttggaccaagcaacactctccctggctgtgagggaagactttctggataacactaccgaagccaaatcttatcgtgatgccctttacaaattcatggtggacactgctgtgcttttaggagctaatagctctcgagctgaacatgacatgaagtcagtgcttagactggaaattaagatagctgagataatgattccacatgagaaccgaaccagtgaggctatgtataacaaaatgaacatctcagagctcagtgctatgattccccagtttgactggctgggctatatcaagaaggtcattgataccagactctacccacacttgaaagacattggcccctcggagaatgtggtggtgcgcgtcccacaatactttaaagatttgtttaggatattaggtgctgaaaggaagaaaaccattgccaactatttggtgtggagaatggtttattccagaattccaaacctcagcaggcgctttcaatatagatggctggaattctcaagggtaatccaggggacaacaactctgctgcctcagtgggacaaatgtgttaactttatcgaaagtgccctcccttatgttgtggggaaaatgtttgtgaatgttcacttccaggaagataagaaggaaatgatggaagaattgattgagggtgttcgctgggccttcattgacatgctggagaaagaaaatgaatggatggatgcagggacaaaaaggaaagctcaagaaaaggcaagagctgttttggcaaaagttggctatccagagtttataatgaatgatacttatgttaatgaagacctcaaggcaatcaaattttcagaatcggactactttggcaacgtactgcaaacccgcaagtatttagcacagtctgatttcttctggctaaaaaaagctgttcccaaaacagagtggtttacaaacccaacaacggtcaatgccttttacagtgcatctaccaaccaaatacgatttcctgctggagagctgcagaagcctttcttttggggaacagaataccctcgatctctgagttacggtgctataggagtaattgtggggcacgaatttacacatggatttgataataatggtagaaaatatgataaaaatggaaaccttgatccgtggtggtctgtggactctgaagaaaagtttaaggaaaaaacaaaatgcatgattaaccagtatagcaactattattggaagaaagccggcttaaatgtgaaggggaaaaggaccttgggagaaaatattgctgataatggaggtcttcgagaagcttttagggcttacaggaaatggataaatgatagaagacagggagttgaagagcccctcctaccaggcatcacattcaccaacaatcagctcttcttcctgagttatgctcacgtgaggtgcaattcctacagaccggaagctgccagagaacaagtccaaattggtgctcacagtcctccacaatttagagtcaatggtgccattagcaactttgaagaatttcagaaagcttttaactgtccggcaaattccaccatgaacagaggtgcagattcctgccgactctggtagctggagtgctggtttctgccatcctgacagagctgaggagtgccggtagaggaggcactcacatactcagcacctactgctttttgcctatattttgtcgaagacttttatttttaatgcatttctattatttgggtagatgatttgcttggatctaaacagtatctgttcaaagtcattgggtttataaaaggaatgcaagaactgagggaaatacatctttttaaagtaagccaaaccaatgaaaacaagtgtcaaggctatttggttaaactgctcttggctgatctcccctatcatccctttatgttagccacggctaggtggtacctaacatttcaatctatagctctgcagggggcctgaggagaatgtatccatagaaaggatcagtcaatgaaaattgtcaccctcagtgataaagttgtgtgccctttggtgtacagtgattatacaacatttcttaattctaaagtggttaaattagaaatacgttggaccttcattttacagtttatgataaagtttttctcttcaggtttggagtctattggacaattatctcagaactttcttcagatgtagctaactgccctgtttaagtaatcatgaacaaagatggcatacagtcaatttggtaaaggatttgggtctataaaatagggaaaaagaacacatctttaactgccagcagtattaaaaactattaaccaccacaataacaactaatcacacaacaataaagataataggaaatgaaatctgcaaacgttgatccagtccctccatacatcagtggacatctatctgacggataacaatcatggagcagttctgattttgttttgttctgctcagatatcctgactgaactgagtatatattgaggaaataatattccgtttccatgtcaggaacatatggttttcatttcctttcagcatgatgatataatcaccacactgaggatggagtaaaaagcctcttccttctcagccactttatgttacctctccttaaaagaaaatttttgcaaaagtttctagaaagaaagcattttggtatatatgaatccaatttaagcaatcctgtctagatctaaaggacataactttactcttcaagtcttatgaaaggtttaatttttctaaaaacagtactgtattttgatctttagagcattatttttgtaatcatcacctatagtgttaattaattaacagtattagtgtgtatttatgtaggataactgttatcacatttaaaagtgtatgtaggataaaattataatggcattgaagtggtgagtatttcctgtttttttctattgttttaaaaattagtatagccatttttctacccccccattacataattcattatacatggggtgctgggttaagtgggccaatataaaaacttcaaaagcaaaatgacaaaatcagatgaaccacaggacttcattttgcatccttgtgacttgtcattcttttgcaaaaaaaaaaaaaaaaaaa

SEQ ID NO: 145 - DNA, 1072 bp, Rattus norvegicus
gtaaatgatcatttggatcaattacaggcttttagctggcttgtctgtcataattcatgattcggggctgggaaaaagaccaacagcctacgtgccaaaaaaggggcagagtttgatggagttcgtggacttttctgtgcggctcgcctccacacctagaggataagcacttttgcagagcgcggtgcggagagatcatgtttgactgtatggatgttctgtcggtgagtcccgggcagatcctggatttctacaccgcgagcccgtcctcctgcatgctgcaggagaaggctctcaaagcctgcctcagtggattcacccaggccgaatggcagcaccggcatactgctcaatccatcgagacacagagtaccagctctgaggagctcgtcccgagccccccatctccacttccgccgcctccggtgtacaagccctgcttcgtctgccaggacaagtcatcgggctaccactatggcgtcagtgcctgcgagggctgcaagggctttttccgacgaagcattcagaagaacatgatctacacttgccaccgggataagaactgcgttattaacaaggtcactaggaatcgatgccagtactgccgcctgcagaagtgctttgaagtgggcatgtccaaagagtctgtcaggaatgacaggaacaagaaaaagaaggagccttcaaagcaggagtgcacagagagctatgagatgacagcggagctggatgacctcaccgagaagatccggaaagcccaccaggaaacctttccctcactctgccagctgggtaaatacaccacgaattccagtgctgaccaccgggtccgattggacctgggcctctgggacaaattcagtgagctggccaccaagtgcattattaagatcgtggagttcgccaagcgtctgccgggcttcacgggcctgaccatcgcagaccagatcaccctgctcaaggccgcctgcttggacatcctgattctcagaatttgtaccaggtataccccagagcaagacaccatgactttctctgatggccttaccctaaatcgaactcagatgcacaa

SEQ ID NO: 146 - DNA, 2036 bp, Rattus norvegicus
gacttttttgcagaagaagggcgcgcgcctgggagtgctttggggtcccggcgcttgcggcggctgccaggagttggagagcgagaaattaaagcgattgagagagagagcgcgcgcggttccgggcccgccgccgcttcttttccggtcgccgcagccgccgccgcagcagggaacgggaccgggggggaggggggcagccgcggacccgcggggccaaggactttgcaacttgccggagaaggtggaggggcgggagggggaggggcgcccgcgcaggagaccgagcgcccagccccgccgcggaccatggtgcagcaggccgagagctcggaagccgagagcaacctgccccgggacgcgctggacaccgaggagggcgagttcatggcgtgcagcccggtggccctggatgagagcgacccggactggtgcaagacggcgtcgggccacatcaaacggcccatgaacgccttcatggtgtggtccaagatcgagcgcaggaagatcatggagcagtcgcccgacatgcataacgccgagatctccaagaggctgggcaagcgttggaagatgctgaaggacagcgagaagatcccgttcatccgggaggcggagcgcctgcgcctcaagcacatggctgattatcccgactacaagtaccggccgcgcaaaaagcccaagacggacccagccgccaagcccagcgcgggccagagcccggacaagagcgcggcgggcgctaaggcagccaagggcccgggcaagaagtgcgccaagctcaaggcgcctgcgggcaaggcgggcgcaggcaaggcggcgcagcctggggactgcggcgcgggcaaggcagccaagtgcgtcttcctggacgacgatgatgaagaggacgacgaggacgacgagctgcagctacggcccaagccggacgcagacgacgacgacgacgagcccgcgcactcgcacctgctgccgccaccggcgcagcagcagccccctcagctgctgaggcgctacagcgtggccaaggtgcccgccagccccacgctcagcagtgccgccgagtcccccgagggcgcgagcctttacgacgaagtgcgcgcgggcggccggctctactacagcttcaagaacatcaccaagcagcagcctccgcccgcgcctcccgcgctgtcgcccgcgtcctcgcgctgcgtgtccacctcctcatccagcggcagcagcagcggcagcggcgccgaggatgccgacgacctcatgttcgacctgagcttgaatttctcccagggcgcgcacagcgcctgcgagcagccactgggcgcgggagcggcggggaacctgtccctgtcgctggtggataaggacctggattccttcagcgagggcagcctgggctcccacttcgagttccccgactactgcacgccggagctgagcgagatgatcgcgggggactggctggaggcgaacttctccgacctggtgttcacgtattgaggggcacagggctcctcgggaggcagtcgtggcggtcaggataaagaggatggtggggggagggggagaagatgctcatggtcagagatgtggcgcagagaaattggaaacggtgatgaaatgttggagttaaagtgaaatgagtagttttaaacagattttccaggtttttttttttaatcttttaatttttaaaaaaattttttggtctccccactcttcccttcctttatcgtgtctcaaggtagttgcacacctagtctggattgtgatttcccccacccgtaaaaaaatcgtgttttgtaatttctatttctttttcctgaaattcgtgattgcaacaaaggcggaggggaccgggcgggggaggggaggaggccccgctccggaaggcgctgtttgaagctcgtggctctttgaagtctgaaagacgtcggcagaggaccctttagacggcacaactgttactctagggagttgatatttttttttcttaagagatttaaaaaggaactggtgatttaaaaaaaaaaaaaaaa

SEQ ID NO: 147 - DNA, 5551 bp, Rattus norvegicus
ctggcatggacgtacacacccgctggaaagctccgcgcccgggcgccccgctgctgtcctcgccgctgctcctgctcctgctgctgctgtgggcgccgcctccgagccgcgcagctcagccaacagatcttctggagatgctagattttcacaatttgccctcaggcgtaacgaaaaccacaggtttctgtgccactcgacgatcttccaaagagccggatgttgcctaccgagtctctaaagatgcacagctcagcatgcccaccaagcagctgtaccctgagtctgactttcctgaggacttctccatcctgacaaccgtgaaagccaagaaaggcagtcaggccttcctggtctccgtttacaatgagcagggcatccagcagttgggactggagctgggccgctcccctgtcttcctctatgaggaccacacagggaagcccgggcctgaagagtatccactcttccctggcatcaacctgtccgatggcaagtggcaccgaatcgctatcagtgtatacaagaaaaatgtcaccttgatcctcgactgtaaaaagaagatcacgaagttcctcaaccgcggcgaccaccccataatagatgtcaacggtatcatcatgtttggctcccggattctggatgatgaaatatttgagggtgacatccaacagttgctcttcgtctccgaccaccgagctgcctatgattactgtgagcactacagccccgactgtgacacagcggtccctgacacacctcagtcacaggaccctaacccagatgaatattacccagaaggagagggtgagacctattactatgagtacccatattatgaagaccctgaagacccgggaaaggagcccgccccctctcagaagccagtggaagccgccagagaaaccacggaggttcctgaggagcagacccagcccccatccgaagcccctacagtgcctgagaccagtgacacggctggcaaggaggacaatccagggatcggggactacgactatgtgcccactgacgactactacactacatccccgtatgaagacttcggctatggcgagggcgtggagaaccccgaccagcccaccaaccctgactcaggggccgagatccccaccagcaccagtgttacctccaattcctccaatccggctccatctccagaggaagggaaggatgacctgggaggtgagttcaccgaggagaccatcaagaatctagatgaaaactactacgacccgtactttgacccggactccgactccaatgtctctccatcggagatagggccaggcatgcctgctaaccaggacaccatctatgaagggattggaggaccccgaggtgagaaagggcaaaagggagaaccagccatcattgagccgggaatgctgatagaggggccccctggccctgaaggccctgctggtcttccaggacctccaggaactacgggtcctactggccaaatgggtgaccctggagaaaggggtccccctgggcgcccaggtcttcctggggctgatggcttgccaggtccccccgggaccatgctcatgctgccgttccgttttggaggtggtggcgacgccggttctaagggccccatggtctctgcccaggaatcccaggcacaggctatccttcagcaagccaggttggcactaaggggaccagctggtccaatgggtctcaccgggagacctggccccatgggtcctcctgggagtggaggtttgaagggtgagccaggagacatgggacctcagggtcctcgaggtgtgcaaggtccacccggcccaacagggaagcctggaagacggggccgtgctgggagtgatggtgccagaggcatgcctggacaaacaggccccaagggtgaccgtggctttgatggtctggctgggttgccgggagagaaaggccatagaggtgaccctggtccttctggcccgccgggactcccaggagatgatggagaaaggggtgacgatggagaagttgggcccagggggctgcctggggagcctggaccacgtggtctgcttgggccaaaaggcccccctggcccacctggacctcctggtgtgacgggtatggatggccagcctggccccaaaggaaatgtgggtccccagggagagcctgggcccccaggacagcagggtaatcctggtgcccagggtcttcccggtccccagggtgccattggtcctccaggagaaaagggtcctttggggaaaccaggtctcccaggaatgcccggagctgatggacccccggggcaccctggcaaagaaggtcctccaggagagaaaggaggccagggtcctcccggcccccagggtcccattggctacccaggtccacgaggagtcaagggggcagatggcatccgagggctgaagggcaccaagggagagaagggtgaagacggcttccctgggtttaaaggcgacatgggaataaagggtgaccggggggagatcggcccacccggcccccgaggagaagatggtcctgaaggcccaaaaggtcgaggtggtcccaatggtgatcctggtcccctggggcccaccggggagaaggggaagctcggagtgccaggattaccagggtacccaggaagacaagggccaaagggttctattggattccctggcttcccgggcgccaacggagagaaaggtggcagggggacacctggaaagccaggaccacggggacagcgaggcccaacgggcccgaggggtgaacgaggcccacggggcatcactgggaagcctggccctaagggcaactcaggaggtgatggcccagccggccctcctggtgagcggggacccaatggaccccaaggccccaccggcttccctggacctaagggtcccccgggtccaccaggcaaggacgggctccccggacatcctgggcagagaggggagactggtttccaaggcaagactggccctccaggccctccaggagtggttggccctcagggtcccacaggcgagacgggtcccatgggggagcgtggccaccctggtcctccaggcccccctggtgaacagggcctcccaggtgctgctgggaaagaagggacgaagggtgacccaggtcctgctggcctccctgggaaggatggacctccaggattgcgtggattccctggggaccgagggctccccggccccgtgggagcactcggactgaaaggcagcgaaggcccccctggccccccaggtcctgcgggttctccaggggagagaggaccagctggtgctgctggacccattggaattccagggagacctgggcctcagggacctccggggcctgctggagagaaaggggttcctggagaggaaggtccgcaaggcccggctggccgagatggcctgcaaggtcccgtggggctccctggaccagccggccccgtgggtcctcctggagaagatggagataagggagagatcggagagcccgggcagaaagggagcaagggcgacaaaggcgagcagggtcctcctgggcctaccggtcctcaaggccccactgggcagccaggcccttcgggagcagatggtgaacctggccctcgtggacagcagggcctgtttgggcagaaaggagatgaaggttcaagaggtttcccaggaccgccagggccagtgggcttgcagggtttaccaggacctccaggagaaaagggtgagacaggagacgtgggccagatgggccctcctggtccaccaggcccccgaggaccctctggagctccaggagctgatgggccacagggtcctccaggagggattggcaaccctggtgcagtcggagaaaagggagagcctggcgaagctggagagcctggccttccaggagaaggaggtcccctgggacctaaaggagaaagaggggagaagggagaggctggcccctctggtgctgctggaccccctggacccaaaggcccacctggagatgatggccccaaaggcagccccggccccgtgggctttcctggagaccctgggccccctggagagccaggcccagcaggtcaagatggcccacctggtgacaaaggggatgatggagaacctgggcagacgggatccccaggccctactggtgaacctggtccatctgggcctccaggaaagaggggtccaccgggccctgcaggccctgaaggcaggcagggggagaaaggagccaagggagaagctggcttagaaggccctcctgggaagactggccccattggtccccaaggggcccctgggaagcctggccctgatggtcttcgtgggatccctggtcctgtgggtgagcaaggcctcccaggatccccaggccctgatggtccacccggccccatgggtcctccaggactccctggcctcaaaggagactccggtcccaaaggtgaaaagggccatccgggcctgattggactcatcggacctccgggcgaacaaggtgaaaaaggtgaccgaggactcccaggcccccagggctcatctggtcctaaaggagaacagggcattacaggtccttctggcccgcttgggcctcctggtcccccaggcttgccgggccctccaggtcccaaaggtgctaaaggttcatcgggtcccactggcccgaagggcgaggcaggccatccaggactccctggtccacccgggcctccaggcgaggtcatccagcccctgccaatccaggcgtccaggactcggcggaacattgatgccagtcagctcctggatgatggggctggggagagctacgtggattatgcagatggcatggaagagatctttggttccctcaactccctgaagctggagattgagcagatgaagcggccactgggcacacagcagaacccagcccgtacctgcaaggaccttcaactctgccatcctgatttcccagacggcgaatactgggtcgatcccaaccaagggtgctccagggactccttcaaagtctactgcaatttcacagctggagggtccacgtgcgtcttccctgacaagaagtctgagggagccagaatcacttcttggcccaaagaaaacccaggttcctggttcagtgaattcaagcgtgggaaactgctctcctatgtggatgctgaaggcaaccctgtgggcgtggtacaaatgaccttcctgcggctgctgagtgcctctgcccagcagaacatcacctacaactgctaccagtccgtggcctggcaggatgccgccacaggcagctacgataaggctatccgcttcttgggctccaacgatgaggaaatgtcttatgataacaacccctacatccgtgccctggtggatggctgtgctaccaagaaaggctaccagaagacggtgctggagattgacacgcccaaagttgagcaagtccccattgtggacatcatgttcaccgactttggtgaagcctcacagaaatttggatttgaagtagggccagcttgcttcctaggctaggagctgtgagcccaccgtctacc

SEQ ID NO: 148 - DNA, 366 bp, Rattus norvegicus
atgtcccagaaacaagaagaagaaaaccctgcggaggaaaccggcgaggagaagcaggatacacaggagaaagaaggtattcttcctgagaaagctgaggaagcaaagctaaaggccaaatatccaagcctaggacaaaagcctggaggctccgacttcctcatgaagagactccagaaagggcaaaagtactttgactcaggagactacaacatggccaaagccaagatgaagaacaagcagctaccgagtgcaggagcagacaagaacctggtgactggtgatcacatccccaccccacaggatctgccccagagaaagtcctcgctcgtcaccagcaagcttgcgggtggccaagttgaatga

SEQ ID NO: 149 - DNA, 513 bp, Rattus norvegicus
caaggtagcttagccaacatggctgtccccttgccatctaccctgagactcagttctgcacctgatgaaattcagcacccgcacatcaaattttccgagtggaaatttaagatgtttagggtgagatcctttgaaaaggcacccgaagaagcacaaaaagagaaggattcctcagaagggaaaccttgtctcgagcagtctccagtagttctagataagcctgggggtcagaattcagttctgactcaacgagcattgaaactccatcctaaattttcaaagaaattccatgttgatgggaagtcaagcgacaaagcaattcaccaagccaggcttagacacttctgccgcatctgtggcaatcacttcaagagtgacgggcacaaccggagatacccagtcaccgggcccgtggacgctaaaactcaaagccttttccgaaagaaggaaaaaagagtcacgtcctggccagatctcattgccagagttttccggatcgacgtgaaggcagat

SEQ ID NO: 150 - DNA, 3488 bp, Rattus norvegicus
cacacacacacacacacacacacacacacacacacacacacacacagaacctgcgcctgtgcctgtgcctgtgcctgtgcctgtttgagagctggagacacagaaggatccccttggcaaggatggaattgaagaccgaggaggaggaggtgggtggtgtccagccggtgagcatccaggctttcgccagcagctccacgctgcatggtcttgcccacatcttctcctatgagcggctgtctctgaagcgggcactgtgggccctgtgcttcctgggttcgctggccgtcctgctgtgtgtgtgcactgagcgtgtgcagtactacttctgctatcaccacgtcaccaagcttgacgaagtggctgcctcccagctcaccttccctgctgtcacactgtgcaatctcaatgagttccgctttagccaagtctccaagaatgacctgtaccatgctggggagctgctggccctgctcaacaacaggtatgagatcccggacacacagatggctgatgaaaagcagctagagatattgcaggacaaggccaacttccggagcttcaagcccaagcccttcaacatgcgtgaattctacgacagagcggggcacgatattcgagacatgctgctctcgtgccacttccgtggggaggcctgcagcgctgaagatttcaaagtggtcttcactcggtatgggaagtgttacacattcaactcgggccaagatgggcggccacggctgaagaccatgaaaggtgggactggcaatggcctggagatcatgctggacattcagcaagatgaatatttgcctgtgtggggagagaccgacgagacatccttcgaagcaggcatcaaagtgcagatccacagtcaggatgaaccccctttcatcgaccagctgggctttggtgtggctccaggtttccagacgtttgtgtcttgccaggagcagaggctcatctacctgccctcaccctggggcacctgcaatgctgttaccatggactcggatttcttcgactcctacagcatcactgcctgccggattgattgcgagacgcgttacctggtggagaactgcaactgccgtatggtgcacatgccaggggacgccccatactgcactccagagcagtacaaggagtgtgcagatcctgccctggacttcctagtggagaaagaccaggaatactgcgtgtgtgagatgccttgcaacctgacccgctacggcaaggagctgtccatggtcaagatcccaagcaaagcctccgccaagtacctggccaagaagttcaacaaatcggagcagtacataggggagaacattctggtgctggacattttctttgaagtcctcaactatgagaccatcgagcagaaaaaggcctatgagatcgcagggctgttgggtgacatcgggggccagatggggttgttcatcggtgccagcatcctcaccgtgctggaactctttgactatgcctacgaggtcattaagcacaggctgtgcagacgtggaaagtgccagaaggaggctaagaggagcagcgcagacaagggcgtggcgctcagcctggatgacgtcaaaagacacaatccctgcgagagcctccgaggacatcctgccgggatgacgtacgctgccaacatcctacctcaccatcccgctcgaggcacgtttgaggactttacctgctaagccctcgcaggccgctgtaccaaaggcctaggtggggagggctgggggagcaaggggcccccaactgcccccagctaccctgtggacttaactgcattcctggtcagtggttccctcttgtctgtggtgagaaaggagtcttgaccatagagtcctctcccagcctctatcccatctttttattttaatttaatcacatttgctctgtaatattgcttgaggctggggatcgtgatttccccccagttcttttattgttgagaatagttttctctattctgggttttctgttatttcaaatgaatctgcaaattgctcttcccatctctatgaagaattgcgttggaattttgatggggattgtattgaatctgtagattgcctttggtaagatggccatttttactatgttaatcctgccaattcatgagcaagggagatctttctatctctgaaatctacttcagtttctttcttcagagacttgaagttcttgtcataaaaatctttttggttagagccacaccaaggtattttatattgtttgtgactattgtgaatggtgtcatttccctaatttccttctcagcctacttatcctttgagtagaggaaggcttctgatttgtttgggttaattttatacccagctgctttgctaaagttctttatcaggtttaggtgttctctggtggaacttttggggtcacgtaagaatactattatatcatctgcaaatagtgatatttcacttcttcctttccaatttctatccctctggggactttttgttgtctaattgctctggctaggacttcaaattctatattgaatagatagggagagagtgggcagccttgtctagttcctggttttcgtgggatcgcttcaaatttctctccatttagtttgatattggctactggtttgctgtatatggcttttactgtacttaggtatgggccttgaattcctgatatttccaagacttttaacatgaaggggttttgaaatttgccaaatgctttctcagcatctaatgagatgatcatgtgccctccccccaccttgagtttgtttatatagtgggttacatgaaaggatcatttctaatagtccacaagtctgccaaatcttgctgattgtgactcatttccatagcaggctctataacttctctaacagattgcattaaactctgcttggggaaggcattacctcttggttgaagcaatgttgtagtttctatgcctgctgagtaaatagcctcaagtccaagtacttgcccagactaatgatcaaacgtatccaggagttccataccagagatgtactcttctctcctttgaagtacattgctggaagagtaattgtgtttgctagagatactccttcgaactgcaaaagaaatctcttggctaagcatataatcaagcctcaggttttctttttattaaatagctgcttgtaagaaagtggacactaagcatatacctcaaagggagacagaatgactctgtgccttcactgatggaagtctgggttacaaattacatcagaagaacctatcatagtgaaacatctcattcccctggtataatcccttctagaaatacacttgtgactctgaaatgttataatcgtgacaactaggctgttacagatacaccaagttaaatttgatagagaaaccaggcttggagcctcatgtccatagggcaagaggaagatgctgagtgtttaaggttggtttgagcgaagaacaataccttgtgtcacaaaaatg

SEQ ID NO: 151 - DNA, 1097 bp, Rattus norvegicus
gtgccgagcacagttactggaaggcttaaccaaagttttgatgcctgggaaccgcgcaggaaaaacacgcggaacgtgcttcacagtggcggctaactgctctcgttcgctgtgcagagccgtctggcagggttgacctcctaaagggatattccatctttattaatcattagtagtgtggtcagagacttagcaccattggtctcccccaacctggtccagacatttcagcagtttatcggaacagcaacaacagcaacaaaaccttcaaaatttacaagtctttaagaaatagaaatggcatccaaaagagctctggtcatcctagccaaaggagcagaggagatggagacagtgattcctgtggacatcatgcggcgagctgggattaaagtcaccgttgcaggcttggctgggaaggaccccgtgcagtgtagccgtgatgtagtgatttgtccggataccagtctggaagaagcaaaaacacagggaccatacgatgtggttgttcttccaggaggaaatctgggtgcacagaacttatctgagtcggctttggtgaaggagatcctcaaggagcaggagaacaggaagggcctcatagctgccatctgtgcgggtcctacggccctgctggctcacgaagtaggctttggatgcaaggttacatcgcacccattggctaaggacaaaatgatgaacggcagtcactacagctactcagagagccgtgtggagaaggacggcctcatcctcaccagccgtgggcctgggaccagcttcgagtttgcgctggccattgtggaggcactcagtggcaaggacatggctaaccaagtgaaggccccgcttgttctcaaagactagagagcccaagccctggaccctggacccccaggctgagcaggcattggaagcccactagtgtgtccacagcccagtgaacctggcattggaagcccactagtgtgtccacagcccagtgaacctcaggaactaacgtgtgaagtagcccgctgctcaggaatctcgccctggctctgtactattctgagccttgctagtagaataaacagttccccaagctcctgacggct

SEQ ID NO: 152 - DNA, 1281 bp, Rattus norvegicus
ggccgcgcagccatggccggggagcggcgccgggcgctgctggagctgctgacgcgtccggggaactcgcgctgcgctgactgcggagccccggatcctgactgggcgtcctacaccctgggtgtgttcatctgtttgagctgctctgggatccaccggaacatcccccaggtcagcaaggtgaagtcagttcgtctggatgcctgggatgagacccaagttgagttcatgacatctcatgggaacgaggctgccagagccacatttgagtccaaagtaccacccttctactaccggcccacgttctccgactgccaactcctacgtgagcagtggatccgtgccaagtatgagaggcaagaattccttcatgtggagaaacaggaaccgtactctacaggataccgtgagggccttctctggaagcgtggccgggacaacggacagttcttaagtcggaagtttgtgctgacagaacgagagggtgctctgaaatacttcaacaaaaatgacgctaaggagcctaaggctgtcatgaagattgagcacctgaatgccaccttccagccagccaagatcggccacccccatggcctgcaggtcacctacttgaaggacaacagcactcgcaacatctttatctaccacgaggatggcaaggagatcgtggactggttcaatgcgctgcgagcagcccgcttccactacctgcaggtggctttcccaggagccagtgacgcagatctggtgcccaagctctctaggaactacctgaaggaaggctacatggagaagacagggcccaagcagacagaaggctttcggaagcgctggttcaccatggacgaccggaggctcatgtacttcaaagaccctctggatgcctttgcccgaggggaagtcttcattggcagcaaggaaagtggttacacggtcctggagggcctcccaccgtcaacccagagtcaccactggccccatggcatcaccattgtcacccctgaccgaaaattcctgttcacgtgtgagacagagtcagaccagagggagtggatagcagccttccagaaggtggtggacaggcccatgctgcctcaggagtacgcagtggaagcccacttcaagcataaaccctaaggaagagagcccggaggccccaggattctgcactcgtgtggcggcgctggacagcaggagagcctctgttcctcggtgtggcccaggcatggccaggtggggctcaggcaagcccatcagatagacagatttttcagaacctca

SEQ ID NO: 153 - DNA, 3743 bp, Rattus norvegicus
cgggatccttgtggacaaactttgatggggaatttcacacagcgctggaaaaatgccggttatgaaaggattgctggcgccacagaacaccttcctggacactattgccacccgtttcgacggaacacatagcaacttcatcctggccaatgcccaagtggcaaaaggtttccccatagtctactgttcagatggcttctgtgagctggctgggtttgctcgaactgaagtcatgcagaagagttgcagctgcaagtttctgtttggggtggagaccaacgagcagctgatgcttcagatcgaaaagtccctggaggagaaggtagagttcaaaggagaaattatgttctacaagaagaatggggctccattttggtgcctgttggatatcgttcctataaagaatgagaaaggagatgtggtccttttcctggcctcattcaaagatataacagacacgaaagtgaagattacttcagaagataaaaaagaagacagagccaaaggaagatcaagagcagggagccacttcgactcagcccgcagacggagccgagcagtcctttatcacatctcaggacacctgcaaagaagagaaaagaacaaattgaaaataaataataacgtgtttgtagataaaccggcgtttccagagtataaggtttccgatgcaaaaaagtccaagttcatcctgctgcacttcagcacttttaaagctggctgggactggctcattttgctggcaacgttttatgttgctgtgacagtcccttacaacgtgtgcttcattggcaatgaggatctgtccacaactcggagcacaacggtcagtgacatcgctgtggagattctcttcattatagatattattctaaatttccgaacaacttatgtcagcaagtctggccaagttatctttgaagcgagatccatttgcatccactacgtcaccacctggttcatcattgatctgattgctgccctgccctttgacctcctgtatgctttcaatgtcacagtggtgtccctcgtacatcttctgaagactgttcggctgctccgtcttttgcgcctcctgcagaagctggaccgttattctcagcacagcacaattgtcctcaccctgctcatgtccatgtttgctctccttgcacactggatggcatgtatctggtatgtcattggaaaaatggagagggaggacaacagccttctcaagtgggaagtcggttggcttcacgagctgggaaagagactggaatctccgtactacggcaacaacacgctgggcggcccgtccatccgcagtgcctatatcgcagccttgtacttcactctcagcagcctcaccagcgtgggatttgggaatgtgtccgctaacacggatgcagagaagatcttctccatctgtaccatgttgattggagccctgatgcatgccttggtatttgggaatgtgactgccatcatacagagaatgtactctagatggagcctgtaccatactagaaccaaggacctaaaggacttcatccgtgtgcatcacctgccccagcaactcaagcagaggatgcttgagtactttcagacaacttggtctgtcaacaatggaatagattcaaatgagcttttgaaagactttccagatgagctgcgctctgacatcacaatgcatctgaacaaggagatcttacagctgtccctgtttgaatgtgctagccggggctgcctcaggtctctgtctctccatattaaaacctcattctgtgccccaggagagtatctgctgcgccagggagatgcgttgcaggccatctacttcgtgtgctcaggctctatggaggttcttaaagacagcatggtgttggctattctagggaagggggatttaattggagcaaatttatcaattaaagaccaagtgatcaagaccaacgctgacgtgaaggctctgacctactgtgatctacagtgcatcatcctgaaaggtctctttgaggtgctgggcctttacccagagtacgcacacaaattcgtagaagacatccagcacgacctcacatacaaccttcgagaaggtcatgagagtgatgtaatatcaagattatcgaacaaatctacagtcccacaggcagagcccaaggggaatggaagcatcaagaagagactcccatccattgtggaagatgaggaagaggaggaagtggaggaagaggagaccacctccctttctcccatctacacaaggggatcctctgtttcacacagcaaaaagactggaagcagtaagagctatctaggtttgagcttaaagcaactgacctcaggaacagttccattccactcacctatcagagtctccagtgccaactcccctaaaaccaagcaggaagctgacccacctaaccatggcacacggaaagagaagaatctgaaagttcagctctgcagcctgggtactgctggaaccccagagctcagtccgaggattgtcgatggaattgaagatggcaacagcagtgaggaaactcagacttttgattttggctctgaacaaatcaggccagagcccaggatttccccttcccttggagaatcagagattggagctgcgtttctgttcatcaaggctgaagaaaccaagcagcagataaacaagctcaacagtgaggtcacaacattgactcaggaggtctcccagctagggaaagatatgagaagcatcatgcaacttctggaaaacatcttgtcacctcagcagccatcacaattttgttctctgcatcccacttcaatctgtccttccagagaaagtttccagactagggtgagctggagtgctcaccagccttgcctacacttgcaggcaaatggagcacatctttaccatggcaatgtcacctctgacatctggagtgtcgacccctccttggtgggcagcaaccctcaacgaactgaagctcatgagcaaagtccagtagatagtgaactgcatcattctccaaacctggcttattccccctctcactgccaggttatccaagaaggccacttgcagttcctaaggtgcatctcccctcattcagataccacactgacacctttgcagtccatctcagccactctctcatcctctgtgtgctcctcatcagaaacatccttgcacctcgttctcccaagtaggtcagaggagggcagcatcactcatggacctgtgagttctttcagtttggaaaacttaccaggatcttgggaccgagaaggaatgatgtcagcctctacagaacccttggagaactttccagtagaagttgtcacaagcacagcggatgtaaaagacagcaaagccataaacgtataatatcagcacataagggcagctttcaatgccaaatccactgctgcatgacagctctagtttgcctttgtggcttctagcaggtgtggagcctgagcaaagttaggaattctgcaggaaagagggcaaggggccagtaaaaggcagagccacctctatactgtagcaaacaatttctagatcgtagaagcataaaaccttttctgtacaggtattaacttactggtctgattgacagactttggtaacaatcctatgacccagagggtctgagcagatagaaaccccagacaaagagtttggggattagttttgtcataagtggatttttttgtgaagtgcagcaaaggttttttttcctgagtgcctggttgtcattcctgaa

SEQ ID NO: 154 - DNA, 3953 bp, Rattus norvegicus
gctggcatgggcaacttgaagagtgtgggccaggagcctgggccaccctgtggcctagggctcgggctgggcctagggctatgcggcaagcagggcccagcctcaccggcaccagagcctagccaggcaccagtacccccgtccccaacccgaccagcaccagaccacagccccccgttaacccggcccccagacggacccaagtttcctcgagtaaagaactgggaagtgggcagcatcacctacgataccctcagtgcacaggctcagcaggatgggccctgtaccccaagacgctgcttgggatccctggtatttccaaggaagttacagagccggcccacccagggcccttcacccactgagcagctattgggtcaagcccgggacttcatcaatcagtactataactcgatcaaaaggagtggttcccaggctcatgagcagcggcttcaggaagtggaagctgaggtggtggccacgggcacctaccagctccgggagagtgagctggtgtttggggccaaacaggcctggcgcaacgctccccgctgtgtggggcggatccagtgggggaaactgcaggtatttgatgctcgggactgcaggacagcacaggaaatgttcacctacatctgtaaccacattaagtatgcaacaaaccgaggcaatcttcgttcagccatcacggtgttcccccagcgctacgctggccggggagacttccggatctggaacagccagctggtgcgctacgcgggctataggcagcaggacggctctgtgcgaggggaccctgccaacgtggagatcactgagctctgtattcaacatggctggaccccaggaaatggccgctttgatgtgctgcccctgctactccaggctcccgatgagcccccagaactcttcactctgcccccagagctggtcctcgaggtgcctctggagcaccccacgctagagtggtttgctgcccttggcctgcgctggtatgccctcccagctgtgtccaatatgctgctagaaatcgggggcctggagtttccggctgcccctttcagcggctggtacatgagttcagagattggcatgagggacctgtgtgaccctcaccgatacaacatacttgaggatgtggctgtctgcatggatctagacacccggacaacctcatcactgtggaaagacaaggcagcagtggaaattaacgtggctgtgctgtacagttaccagctggccaaagtgaccattgtggaccaccatgccgccacagcctccttcatgaagcacttggaaaatgagcagaaggccagagggggctgccccgctgactgggcctggatcgtgccccccatctcaggcagcctcacccctgtcttccatcaagagatggtcaactatttcctgtcccctgccttccgctaccagcctgacccctggaaaggaagtgcagcaaaaggcacaggcatcaccaggaagaagacttttaaggaagtagccaatgcagtgaagatctctgcctcactcatgggcacggtgatggcgaagcgtgtgaaggcgactatcctgtatggctctgagactggccgcgcccagagctacgcacagcagctggggaggctctttcggaaggcgtttgacccccgggtcctgtgcatggatgaatacgatgtggtatccctagagcatgaggccttggtattggtggtgaccagcacatttggcaatggggatcccccggagaatggagagagctttgcagcagcgctgatggaaatgtcgggcccctacaacagctcccctcggcctgagcagcacaagagttacaaaatccgattcaacagtgtctcctgctcggacccactggtatcctcttggcggcgcaaaaggaaggaatccagtaacacagacagtgcaggggccctgggcaccctcaggttctgtgtgtttgggctgggctccagagcatacccgcacttctgtgcctttgctcgagcggtggacacaaggctggaggagctgggcggggagcgactgttgcagctgggccagggtgatgagctctgcggccaggaggaggctttccgaggctgggcccaggcagccttccaggctgcctgtgaaactttctgtgtgggagaagatgccaaggctgctgcccgagatatcttcagtcccaagcgcagctggaaacgccagaggtaccggctgagtacccaagctgagagcctgcaattactgccagggctgactcacgtgcacagacggaagatgttccaggctacaattctttctgtggagaacctacagagcagcaaatccacccgagccacaatcctggtgcgtctggacactggaagccaggagggactgcagtaccagccaggggaccacataggtgtgtgcccacccaaccggcctggcctagtggaggcgctgctgagccgagtggaggaccctccgccatccacagagcctgtggccgtggaacaactggaaaaaggcagccctggtggccctccccccggctgggtacgggacccccggcttcccccatgtacgctgcgccaggctctcacttacttcctggacatcacttccccgcccagccctcgccttcttcgactgctgagcaccctggcagaggagtccagcgaacagcaggagctagaggctcttagccaggacccccggcgctacgaagaatggaagtggttccgctgccccacactgctagaggtgctggaacaatttccatccgtggcactgcctgccccgctgatcctcacccagctgcccctgctccagccccggtactactctgtcagctcagcacccagcgcccacccaggagagatccacctcactgtagctgtgctggcatacagaacccaggatgtgctgggccctctgcactatggggtctgttccacatggatgagccaactcaaggcaggagacccggtgccctgcttcatcaggggggctccctccttccggctgccacctgatcctaacttgccttgcatcctggtgggcccagggactggtattgcacccttccggggattctggcaagaccgattacacgacattgagatcaaaggactgcagcctgcccccatgactttggtgtttggctgccgatgctcccaactggaccatctctaccgggacgaggtactggacgcccagcagcgtggagtgtttggacaagtcctcaccgccttttccagggatcctggcagccctaagacctatgtgcaagacctcctgaggacagagctggccgcggaggttcaccgcgtgctgtgcctcgagcaaggacacatgtttgtctgcggtgatgtcactatggcaaccagcgtcctgcaaaccgtgcagcgaattctggcaacagagggcagcatggagctggatgaagccggtgacgtcatcggcgtgctgcgggatcagcaacgctaccacgaggacattttcggactcacattgcgcacccaggaggtgacgagccgcatccgcacccagagtttttctttgcaggagcgacagctgaggggtgcagtgccctggtcctttgacccgcctacccaagaaacacctggttcctgacaatcttcttcccctccagttcccggagagagggactgcgtcgcttcattaggttgaccaaggcaaaccaccctctctggaatgcccacagcatcagttgcgaggctgccgatttaagaactctcttctcggggctggggatttagctcagtggtaaagcgcttgcctaggaagcgcaaggccctgggttcggtccccagctccggaaaaaaaaaaaaactctcttctctctccagtttaactagactgggagggagtcagcctaaatcctgaaggttcctccggctgtggtattaggacatcctgctgccctcttcgtatgctttgatggactgtag

SEQ ID NO: 155 - DNA, 2294 bp, Rattus norvegicus
gttggggtcgtctgagggcttaggccaggtggtcttgtgaccggtccctgtcaccttcccacaaagtgaaagaataagcctctgccgggcagatttgagctgaagtcggagccctgcggcaggctcccggcatggccgtgtccacccagcagctggcggaggagctacagatcttcggcctggactgcgaggactccctgctggagaaattggcagagctgtgtactctgtaccgacagactgaggagaggatggtgagcgagctgatcgccttctgcaccagcgcagggaaatcgtgcctcactggagagatcctcagttcctttgagcacgaggttctgaacaaaaagctctccaaagcctgtcacagtgcctccaaagacaacaggcacgcaggagccagagatattgtctccatacaagagctaattgaagcagaggaggaagaggagacccttctgagcgcttacaccacaccctctaagggtcctcacaagcgagttagcagcaccccagaaacccccctaaccaaaaggagtatctctactcgcagcccacaccagcttctctccccatcgagtttctccccaagtgctaccccttcccagaaatacagctccagaaccaaccggggagaagtggtcaccacctttggctcagcacagggcgtgtcttggtccgggagaggaggctctggaagcatcagtctgaaggtcatggggtacccagaaccactcaccagcagctataaaactatgtttcagcagctcccggatattcgggaagttctgacctgtaagatagaggagcttggcagcgagctgaaggaacattacaagatcgaggcgtttacccctctgctagtcccagcacaggaacctgtcatcctgctgggtcagattggctgtgacagcaacgggaggctaaacagcaagtcagtgatcctcgagggagaccgggagcactcctctggcgctcagattccagtggacatgtccgaactcaaagactactctctgtttcctgggcaggttgtaattatggaaggattcaacaccactggcaggagacttactgccaccaaactctatgagggtgtgccacttccgttctatcagcccactgaagaggagggagattttgagcagactatggtgttagttgcctgtgggccttataccacctctgacagcatcacatacgaccccctgcttgatctgatcagcaccatcaaccatgaccggctagatgtctgcatcctgttcggccctttcctggatgctaagcatgaacaagtggagaactgtaagttgacaagcccattcgaagacattttcaagcagtgcctgagaacagttatcgaaggaacgagaagctccggctcccaccttgtctttgtcccgtctctgagggatgtgcaccacgagccagtctacccacagccacctttcaccttctccgaactgcctcgagaggacaagaagcgagtgcagtttgtgtcagagccctgcaacctctccataaatggggtgatgtttggtttgacatccacggacctgctgttccacattggggccgaggagatctgtagctcctctgggacttcagacagattcagccgaatcctcaagcacatcctgacgcagagaagctactacccactttacccaccccacgaggacatggccatagactacgagaacttctatacctatgcccagctgccggtcacccctgatgttttcatagtgccatcagagctgaggtacttcgtgaaggacatcttcggctgtgtctgtatgaatcctggacggctcaccaaaggacaagtgggcggcacctttggccgcctctacctcaggaggcagcccaagggcacggacagtgaggggaggcaggggctgagtgtggctgcgcaggtggtcagaatctgagtcttcagcctgggttgtctggcctcacagacaccaagagtccaggtacgaccccctggtgaccaaactgtcagggtacctgacaaggatctggccacaaggtcaggacttcagggctgcgccatccgatcgcagcccccgctgctcctcaccccacgcagcggggccttgatctggatcatgcttcttgcctctctcctgcttcacaagataggtgtccagacgtgaaccatctatggagacagcccgcccagaaaggcaggaaaacattgtgattttctgtatgaagcaaacagcgtgtggagaaataaaaaaattttttagtataactgaaaaaaaaaaaaaaaaaaaaaaaaaaaa

SEQ ID NO: 156 - DNA, 1192 bp, Rattus norvegicus
ggaaaggagccgttagcgtgctccgtccattgccatccaccggtcgttcccggcgacagacctccgtcaacttttgaaggggagttggttctcaggtccagcggccgcgatccctggtctcccagcctacggagttacccggcggagttcaagtccagcagccatgtccatgagcctggagatcaccggcacgtcgctggccgtgctgggctggctgtgcaccatcgtgtgctgcgcccttcccatgtggcgcgtttcggcattcatcggcagcagcatcatcacggcgcagatcacctgggaaggcctgtggatgaactgcgtgcagagcaccggccagatgcagtgcaagatgtacgactcgctgctggccctgccgcaggacctccaggccgcccgagctctcatcgtggtgtctatcctactggcagccttcgggctcctcgtggcgctcgtgggggcccagtgtaccaactgcgtacaagatgagacggccaaggccaagatcaccatcgtggcgggagtgcttttcctgttggcggctgtgctcaccttagtgccggtgtcctggtccgccaacaccatcatccgggatttttataacccgctggtacctgaggcccagaagcgagagatgggaactgggttgtacgtgggctgggctgccgccgcgctgcaattgctagggggcgccttgctgtgttgctcctgcccaccacgcgagaagtacgcacccaccaagatcctctattccgcgccgcgatccaccggccctggcaccggtaccggcaccgcctatgaccgtaagactacgtctgagaggccgggtgcgcgcacaccgcaccatcaccactaccaaccgtcgatgtaccccacccgtccagcgtgcagcctcgcctcagagaccaccccaccttccagacggttacagacgccacgcagtctgcttgctaggctggaagaggacagacagcctggcgtccccttttctccggttgccacctgattacctggcctaggaactgtccaagtcgaatggacaaagacacctcgcccttcccaagtacagggttggggtggccatcgcagctacttgccagccccgcagccagaaggctcatagtgggcagagacaggcaaactataaaaagggccgtttcgtatttttcaataaaagcctttcgtttttgca

SEQ ID NO: 157 - DNA, 754 bp, Rattus norvegicus
gctgatagcgagcactgctatcccacagtggcagatgagctcctatgcaggcgacaacatcatcacagcccaggccatgtacaaggggctctggatggagtgcgtcacgcagagtaccggcatgatgagctgcaaaatgtacgactcggtgcttgccctgccagcggccacgcaggccactcgagccttaatgattgtgtccttggtgttgggcttcttggccatgtttgtcgccacgatgggcatgaaatgcacacgctgtgggggagatgacaaagtgaagaaggcccgcatagctatgactggaggcattattttcatcgtggcaggtcttgctgctttggtagcatgctcctggattggtcatcagattgtcacagacttttataaccccttgacgcccatgaatattaagtacgagtttggtcctgccatctttatcggctgggcagggtctgctctggtccttctgggaggggccctgctctcttgctcctgccccggcagtgaaagcaaagctgcataccgtgcaccccgctcctaccctaagtccaactcctctaaggaatacgtgtgagctggggaccccagcctgtgggcaaggtgtgaggcaaaggcctcctggtcactccaccgccaaacaccatgtatagttccctgtgggaggggggggagggccgaggggggtgggtgggagaggaagacaaaacatggggagggtgtgcttttgtacagtaataaaattaagttttgg

SEQ ID NO: 158 - DNA, 4128 bp, Rattus norvegicus
ggttccggctgtgggcagcagggtggtccgcgactgcggccggaagcaggctgagcggctctcggcgagcgccgcctgtacttccggggacttcagcctagctcttgagttttccctgtaggcggcgcgggagggaaaagtttgcagggccgtgctgggaagatcacctccgcttcccaatgtgagcagtttctcgaacgctctctctagaaggttgcccagagaggtggtggacgggaacatgaggcagcgtctcctcttcctgaccactttggtgcctttcgtcctggcaccccgacctccggaggaaccaggctctggctcccacctgcgacttgagaagcttgattctttgctctcagactacgatatcctctctttatctaatatccagcagcactccataaggaaaagggatctacagtctgcgacacacttagaaacactactaactttttcagctttgaaaaggcattttaaattatacttgacatcaagtacagaacgcttttcacagaacttgcgagtcgtggtggtggatgggaaagaggaaagcgagtacagtgtgaagtggcaggacttcttcagcggacatgtggttggtgagcctgactctagggttctagcgcacataggagatgatgatgtcacagtaagaatcaacacagatggggcagaatataacatagagccactttggaggtttgttaatgatactaaagataaaaggatgctggtgtataagtctgaagatatcaaggatttttcacgtttgcagtctccaaaagtatgtggttatttaaatgcagatagtgaagagttgcttccaaaagggctcatagacagagagccatctgaagagtttgtccgtcgagtgaagaggcgagctgaacctaacccattgaagaatacttgtaaattactggtggtggcagatcatcgattttataagtacatgggccgaggagaagagagcactactacaaattacttaatagagttaattgaccgagttgatgacatataccggaacacctcgtgggacaatgcaggatttaaaggttatggagtacagatagaacagattcgaattctcaagtctccacaagaggtaaaacctggtgaaagacacttcaatatggcaaaaagttttccaaatgaagaaaaggatgcttgggatgtgaagatgctgctggagcaatttagccttgatatagctgaagaggcctctaaagtctgcctggctcatcttttcacctaccaagattttgatatgggaactcttggattagcttacgttggttctcccagagcaaacagtcatggaggggtttgtccaaaagcttattacaacccaggtgtgaagaagaacatctatttgaatagtggtctgacaagtacaaaaaattatggtaaaaccatccttacaaaggaggctgacctggttacaactcatgaattgggacacaattttggagcagaacatgatcctgatgggctggcagagtgtgccccaaatgaggaccaaggaggaaagtatgttatgtaccccatagctgtgagtggtgaccatgagaataataagatgttttcaaactgcagtaaacagtccatctacaagaccatagaaagcaaggctcaagagtgcttccaggagcgcagcaacaaggtgtgcggcaactccagggtggacgaaggagaagagtgtgacccgggcatcatgtacctgaacaacgacacctgctgcaatagtgactgcacactgaagccaggtgtgcagtgcagtgataggaatagtccttgctgtaaaaattgtcagtttgagacggcccagaagaagtgccaggaggctatcaatgctacttgcaaaggagtgtcttactgcacagggaatagcagtgagtgccccccaccaggagatgctgaagatgacactgtgtgcttggacctgggcaagtgcaaggctgggaaatgcatccctttctgcaagagggagcaggagctggagtcctgcgcatgtgctgacaccgacaactcgtgcaaggtatgctgcaggaacctttctggcccatgtgtgccttacgtcgatgcagagcaaaagaacttatttttgaggaaagggaagccctgtacagtagggttttgtgacatgaatggcaaatgtgagaaacgggtacaggacgtaattgagcggttttgggatttcattgaccagctgagcatcaacacttttgggaagtttctggcagacaacatcgttgggtctgttctggttttctccttgatattttggattcctttcagcattcttgtccactgtgtggataagaaactggacaagcagtatgagtccctgtctctgtttcatcacagtaacattgagatgttgagcagcatggactcagcatctgttcgcattatcaagccgttccctgcaccccagactccaggtcgtctgcaggccctgcagccggctgcaatgatgccgccagtgtctgcggctccaaaactggatcaccagaggatggacaccatccaggaagaccccagcacagattcacatgtggatgatgatggctttgagaaggaccccttccccaacagcagtgcagccgccaagtcctttgaggacctcacagaccacccagtcaccaggagtgagaaggccgcctccttcaagctgcagcgtcagagccgagttgatagcaaagagacagagtgttagtgggagcctgggcctgctctgggggacacagacctacagatgttccacagagctgacctgaatcaaaatagactgtaatgatctgagaaacgggagcagcttagcagatgctggtcatgtgacaggaccttcacatgacatcctgtgtatgtaggccctttgaagaggtgaggtaaatctggcttatttaaggctttcaggttttggggttttcttttgtaatctaaaaatctcctttgacctgtggtgcagaagcagaaaataaggctggatcaagttcctggtgacagcactgattaagccttcagtctgtttttctgtatgctgtaaggtcctctcactacggtgaagcacttagcagtgaggataactggaacacagactttttgggggttttggccttcacatgtgcgttgtctccaaatgccgtctgtcttggcactgaactttgtggatacagtcctttccaagatgaagactagctctggaacagtctatacaaacagccacatgaacttcaagatggcctattaactgcttagccccaggttccctggacagtttttccgttttgcaaaaagtgtcttcacgggtctctaaacattgtttgtcttaaaaaatactgggctggagagttggccccacagttaagagcacttggtttcattcccagtacccacacggtggctcttaactccaatcccaggggagatgacatcttctgaactctagaacacaaggcatgcattggtgcagtcaaacatgcaggcaacacacacaaatttagaaagccaagtgctgtaagaagttgcacatcccccaacctacagtgcttcgcggtctgagctggagtggagctctctcctgaacactctggaaggctggcaggtgctgagctggctagggagacgggtggggcccagccctggaagaaccgtcttcagcctcagcaagcagacactcgcgttacctcaggctttggggcttcaggacccaggatgttttgtacttattgtgtgaggataaataccattagcctgaattctcatttctgtaagttttagttataaaagctttttttcttctaagaattgcaatgtgctcaccagcaaacacgtcttaaccagaataacttgtaactctgaggacagttaaccaaacctgtgccttgtctctcctgagggtgtctgttacactaatacttgaacatgtaccttgtggtattggctccttttactagtcatgacagccttatatgttagttacactttgaggatttgctctaaggtgagtggggtgtgtgggtgtatgtatgaatgaaacagttggcagaatataagaaaaccatttttataaaattgtgactttttaaaacaaaaaaaaaaaaaaaaaaaaaaaaaaaa

SEQ ID NO: 159 - DNA, 967 bp, Rattus norvegicus
caccctcaggagccttggcagctcctccgggaatcaacttggtggttccacccagctctcagctcaatgtggtcaacagtgtcagcagctccgaggacatcaagcccttaccaggtctgcctgggatcggaaatatgaactacccatccaccagccccgggtctctggtgaaacacatctgtgccatctgtggggacagatcctcaggaaagcactacggggtgtatagctgtgaaggctgcaaaggcttcttcaagagaaccataaggaaagacctcatctacacgtgtcgggataacaaagactgtctcatcgacaagcgccagcgcaaccgttgccagtactgtcgttaccagaagtgcctggtcatgggcatgaagagggaagctgtgcaagaagaaaggcagaggagccgggagcgagcagagagtgaggcagaatgtgccagtactggccatgaagacatgccggtggagaggattctagaagctgagcttgctgtggaaccaaagaccgaatcctacggcgacatgagtgtggagagctcgacaaatgaccctgtcaccaatatatgccacgctgcggataagcagcttttcacccttgttgagtgggccaaacgcatcccccacttctcagacctcaccttggaggaccaggtcattctgctccgggcagggtggaatgaattgctgattgcctccttctcccaccgctcggtttctgtccaggatggcatcctgctggccacgggcctccacgtccacaggagcagcgctcacagcgcgggcgtcggctccatctttgacagagtcctcacagagctggtgtccaagatgaaggacatgcggatggataagtcggagctcgggtgcctgcgcgccattgtgctgttcaatccagatgccaagggtttgtccaacccctcggaggtggagactcttcgagagaaggtttatgccaccct

SEQ ID NO: 160 - DNA, 1946 bp, Rattus norvegicus
ccggggtcgggccaggtcgctgctgctctggccatggctgaggcacgcacgtctcgctggtactttggagggctggcttcctgcggagctgcctgctgcacgcaccctctagacctgctcaaggtgcatttgcagacccaacaggaggtgaagcttcgaatgactggaatggcactgcaggtggtgcgaaccgatggcttcctggcactctacaatggcctgagtgcctcgctgtgcaggcagatgacctactccctgacccggttcgctatctacgagaccatgcgggactacatgaccaaggacagccaggggcctctccccttctacagcaaggtgttgctgggcggcatcagtggtttaactggaggcttcgtggggaccccagcagatttggtcaatgtcaggatgcagaatgacatgaagctgcctctgagccagcgccgcaactactctcacgccctggatggtctgtaccgtgtagcccgtgaagaaggcctgaagaagctcttctctggagcaactatggcatccagccgtggggccctcgtcactgtgggccagctgtcctgctacgaccaggccaagcagctggttctcagtactgggtacctgagtgacaacattttcacccacttcctctccagtttcattgcgggcggatgtgccacatttctctgccagcccctggacgtgctgaagactcgcttgatgaactccaagggcgagtatcagggtgttttccattgtgccgtggagacagcaaagcttggaccacaggcctttttcaagggtctcgttcctgcgggcgtccgtctcgtcccccacaccgtgcttaccttcatgttcctggagcagctgcggaagcacttcggtatcaaagtggcaacctgacaccgccagggacacctgggctgcgctcagtcgctgtgctgagccccttggaagagtaggaagggagtgggctcccttcctccttggcctgggcccgtgctgatccccagaagattcctgttcttcccacccttgggctgctggctacgccttccgaccctgccttggccccactgaagtggcacctctgccctactggctcccaggctctccccactgggacgtcccatcttcctacccgatgattcactcagaagaggtctggcctggctggtgtcactgtccccacctccctggctgctaccctgccctgcctgtcaagcccggagaagctgagtacacttcctgctcttgctggcccactgaacagcttccacccaggacttgggtagtgtggcagggtacagcccctggcagcttctgcttaccaaatgactagagcacgcacgcacacacatacacacatgcacttacgtcacaagagggaccaccgtgcagtgttctggaaggtagtgccttcaggagagggaacagggcagcagcacagatcaccagcaaacgccatgaccgcggagtccggagaaagtacctggggttccctgtgcacctcccgtgctcagccttggctgctttaagagtcagtttttgcggaaccctcctactcagcagccactaccatcatcaggaactggctgtgtccctcatacacctgtgccctcccttgcctggcttcccccagggccaggggctcatgctggagctggggctatgatggattcattttatgtgtcctcctaggacctgttttcccgtatggcaggggtcacccctcaccatccctcagggttcaaagcagcctgttttccctcaaattggggttgtgtgtatatcaacgtgaggttgggccctgtgcccgtttgcctcccctcagcaccaggccctcacccaggaggtgcgggaggtggcagtgggcccaggggcactgcctacatctctcttcaggatctaataaaccaagtggccaaaaaaaaaaaaaaaaaaaaaaaaaaaaa

SEQ ID NO: 161 - DNA, 1194 bp, Rattus norvegicus
agagagagagagagagagagagagagagagaacccacccacccggcgactaatctgatcccggctgtcccccgggaccagcgaggtcccagaagacccacgagggagcgggcgtaacgcgtggctgcgggtgggagccatggacgccttcatccgagtcgccaaccaaagccaaggtcgggaccgacttttcagagccactcaacacgcatgcatgttgcttagatatttgttagagtctaaggctggcaaagaggcggtggtaacgaagctcaagaatctggagactagtgtgagcactggccgtaaatggttcagactaggcaacgtgctccatgccatccaggccactgagcagagcatccaagccactgaccttgtgccccgcctatgcctaacattagccaacctgaaccgcgtggtttattacatctgtgacactgtcctctgggcgaagagtgtgggtctgacatctggaatcaacagagagaagtggcaaatgcgggcggcccgccactactactatttcctcttgctgagcctggtccgggatctgtatgaggtcttgctgcatatgggacaagttgcacgcgacagagcaaagagagagaagtcctccggggaccctcctaagtacagcgtcgctaatgaagaaagtgaatggctccagtccttcctcctcctcctcttccagtctctaaagcgaaatccgcccttattcctggacaccgtgaagaacttctgtgacatcctgatccctttgaaccagctcgggatctacaagtccaaccttggcgtggtaggatttggaggtctcgtgtcctctgtggctggcctcatcactgtggtgtatcctcagttgaaactgaaggcccgctagggtgtttggaaaatttaagactgacgttcagtggagcaaacatttgcttttgtcatgatgtctactgtacttaattttttttaatcatgtgagcatcttaccaaccggtgatgtgagcagaggtaggacccacaacggagcctgaagactgatgacgtttttgtaaacacggcagtaacttctgcacatttccccttcagtgacttctgactactgcaaaaacatttgtgccgtcattgaagacgtgtaaaggggaagtcagaacattgctgagcatcttttctgtacatagtaagagctcatatatctaacaaa

SEQ ID NO: 162 - DNA, 1370 bp, Rattus norvegicus
gggcctgaggcttttaaaaattatacattggattcagcaacagctgccacacaggcagccccagccccagctgcagctccagctgctgccccagctgcaccttctgcaagtgctccaggtagctcctatcccgttcacatgcagattgttcttcctgccctctccccaaccatgaccatgggcaccgtccagaggtgggaaaagaaagtgggagagaagctgagtgaaggagacttgctggcagagatagagaccgacaaggccaccataggctttgaagtacaagaagaaggttatctggcaaaaatcctggtccctgaaggcacaagggatgttcctctgggaaccccgctatgtatcatagtagaaaaacaggaagatatagcagcatttgcagactacaggccaacagaagtgaccagcttaaagccacaggcaccaccacctgtcccacccccagtggcagctgttcctcccatcccccagcctttagcacctaccccctcagccgctcctgctggaccaaagggaagggtgttcgttagccctcttgcaaagaaattggcagcagagaaagggattgacctcacccaagttaaagggacgggaccagaaggcagaatcatcaagaaggacattgactcttttgtgcctactaaggctgctcctgccgctgcagcagctgctcccccgggtccaagagtggcaccaactcctgcaggtgtcttcatagacatccccatcagcaacattcgtcgagtgattgcgcagaggctcatgcagtcgaagcagactatacctcattattacctttctgttgatgtaaatatgggagaggtgctgttggtgcggaaggaacttaataagatgcttgaaggtaaaggaaaaatctccgtcaatgacttcatcataaaagcttcagctttggcctgcctgaaagttcctgaagcaaactcatcttggatggacacagttatacgacaaaatcatgtggttgatgtcagcgttgctgtcagtacccctgcaggacttatcacccctattgtgtttaatgcacacataaaaggactggaaaccattgctagtgatgttgtttctttagcctccaaagcaagagagggtaaacttcagcctcacgagttccagggtgggacatttacaatctccaacttagggatgttcggaattaagaatttctctgcgattattaacccacctcaggcatgtattttggcaattggtgcttccgaggataaactgatccctgcagataatgagaaaggctttgacgtggctagtgtgatgtctgtcacacactcagctgtgatcatcgagttgtggatggagcagttggagcccagtggcttgct

SEQ ID NO: 163 - DNA, 1109 bp, Rattus norvegicus
gaattccctgctgcaaacatggcgctgctggcccgtgcgttctttgctggggtgtcccgcctcccctgcgatcccggtcctcagaagtttttcagctttggaacgaaaaccctgtatcaaagcatcgatgctccacagtctaaattcttcccacccattttaaagcctatgctaccacctaatgcctttcaaggaaaagtggctttcatcacgggaggaggcactggccttggcaaggcaatgacaactttccgctccagcctgggtgcccagtgtgtgatcgcgagcaggaatattgatgttctgaaagctactgcagaagagattacttctaaaactggaaataaggtctatgcgattcggtgtgacgttcgagatcctgatatggtacacaacacagtactggagctgatcaaagttgcagggcatcctgatgtggtgataaacaatgcggcagggaacttcatttctcccagtgagagactgtctcccaatggttggaggaccataactgacatagttctcaatggtacagcctatgtgacgatagaaattggaaagcagctaattaaagcacagaaaggagtcgcctttcttgctatcactacgatctatgctgagagcggatcaggctttgtaatgccaagttcttcagccaaatcaggcgtggaagccatgaataagtctcttgcagctgaatggggtagatacggaatgcgtttcaacataattcagccagggcctatcaaaaccaaaggtgcctttagccgtttggacccgactggaaaatttgagaaagatatgatcgagagaatcccctgtggtcggctgggaactgtggaggaacttgccaatctagcgactttcctttgcagtgattatgcctcttggatcaatggggcagtcattcgatttgacggtggagaggaagtgtttctgtcaggtgaattcaactctctaaagaaggtcaccaaggaggagtgggatgtaatcgaaggcctcatcagaaagacaaaaggctcctaagacgttcatggcttcctctgtgacaaactaaagtttagggactatatagatggacatttgagttaataaattttttgtctgat

SEQ ID NO: 164 - DNA, 1401 bp, Rattus norvegicus
atgggcgcgggggcgctcgccctgggcgcctccgaaccctgcaacctgtcgtcggccgcgccgctgcccgacggcgcggccaccgcggcacgactgctggtgctcgcgtcgcctcccgcctcgctgctgcctccagccagcgagggctcagcgccgctgtcgcagcagtggaccgcgggtatgggcctactcctggcgctcatcgtgctgctcatcgtagtgggcaacgtgttggtgatcgtggccatcgccaagaccccgcggctgcagacgctcaccaacctcttcatcatgtccctggccagcgccgatctggtcatgggactgctggtggtgcctttcggggccaccattgtggtgtggggccgctgggagtacggctccttcttctgtgagctctggacttcggtagacgtgctatgtgtgacggccagcatcgagaccctgtgtgtcatcgccctggaccgctacctcgccatcacgctgccctttcgctaccagagcctgctgacgcgcgcgcgagcgcgggccctcgtgtgcacagtgtgggccatctccgcgctggtgtccttcctgcccatcctcatgcactggtggcgggccgagagcgacgaagcgcgccgctgctacaacgaccccaagtgctgcgatttcgtcaccaaccgggcctacgccatcgcctcgtccgtcgtctccttctacgtgcccctgtgcatcatggccttcgtgtacctccgggtgttccgcgaggcccagaaacaggtgaagaagatcgacagctgcgagcgccgcttcctcacgggcccgccccggccgccctcgcccgcgccctcgccatcaccagggccaccgcgccccgcagactcgctggccaacgggcgctccagcaagcggcggccgtcgcgcctcgtggctctgcgagagcagaaggcgctcaagacactgggcatcatcatgggtgtgttcacgctctgctggctgcccttcttcctggccaacgtggtgaaagctttccaccgcgacctggtgccggatcgcctcttcgtcttcttcaactggctgggctacgccaactcggccttcaaccccatcatctactgccgcagccccgacttccgcaaggctttccagcgcctgctttgctgcgcgcgccgggccgcctgcagacgccgcgcagcccacggggaccggccgcgcgcctcgggctgcctggcgagagctgggccgccgccgtcccccggggctccttcggacgacgacgacgatgacgccggggccaccccacccgcgcgcctgttggagccctgggccggctgcaacggcgggacgaccactgtggacagcgattcgagcctggacgagccgggacgccagggcttctcctccgagtccaaggtgtag

SEQ ID NO: 165 - DNA, 1893 bp, Rattus norvegicus
gggtgtagaacggtgccaccactgtcttcttcgccaccatgggggcccagctgagcacgttgagccgagtggtactctccccggtctggttcgtctacagcctcttcatgaagctgtttcagcgctcctcaccggccatcaccctcgagaaccccgacatcaagtaccctctgcggctcatcgacaaggagattatcagccacgacactcggcgcttccgatttgcactcccttcgccccagcacatcctgggccttcctatcggccagcacatctacctctccaccaggatcgatggcaacttggtcattcgtccctacacccctgtgtctagtgatgatgacaagggctttgtggacttggtggtcaaggtttacttcaaggacacgcatcccaagtttccagctggagggaaaatgtctcagtacctggaaaacatgaatattggagacaccattgaattccggggccccaatgggctactggtctaccagggcaaagggaagttcgccatccgtgcagacaagaagtccaaccctgttgtcaggacggtgaagtctgtaggcatgattgcaggagggacaggcatcaccccaatgctgcaggtgatccgagccgtcttgaaggacccgaacgaccacactgtgtgctatctgctcttcgccaaccagtccgagaaagacatcctgctgcggcctgagctggaggaactgaggaacgaacattcttctcgcttcaagctctggtacacagtggacaaagcccccgatgcctgggactatagccaaggcttcgtgaatgaggagatgatcagggaccatcttccacctcctggggaggagacactgatactgatgtgtggacccccaccgatgatccagtttgcctgtttgccaaacctggagcgtgtgggccatcccaaggagcgatgcttcaccttctgatggctggatgctggccactcccatgcctgctgctcacgcactcaccacaaccaccttccaccccttccttccccactactgtcctttaccctgacatatgcccacatccatgctggggcctgggttcagcctggcctgcccagccctggtcatccagctgtactggcccctgaggggcccctttgggagcaggcctgtgtatcaggtggcttctgttgaccactttctgaataggcttctgtctggtactaactggccattaccagagatggtccatgaccacccctttatacacacacacatacacatacagagacagagagacagagagacagagatagacagagatagacagagagacagatacagacatagagacagacagagacagagagagaggagtcagagagctgttagtaccatgtctacccgttaccatggaccgcaatgtgtagtaaggaaatgaaaggtaaacagttatctacagtcctaggaaccatgcctgtcacctaaccacctactgccttaggctatggcctggtctgtgcccctaaacactacattagacagtgacacccagaggttctcttaggagggtgtctggcagtgacaggccagcccccacttgctggccaggagttccttgggtcagcacgtggacccttccaaaaccccacacactgcccctcccctccatgatgccttgagcaccctaagttgtcagcccaacagagtttggtagaccttggggtacctggcttgtttctccatcccatacctccctcccatctggttcccagcctggggggttctgagcagagcctcttttctcggagacagacccggtgcctggcgctgccttcagcagacagcagacagcctcctgcacactggctttttttagtcatttatgggcaaaatgagttaaaataaaactttgcaaatcctg

SEQ ID NO: 166 - DNA, 2513 bp, Rattus norvegicus
gaattcctgacggatctggagaagcccaatctcgcaggccacatgttcgacgtaggtctgattggaggcggcatctcaggattggctgctgccaaactgttgtctgaatacaaaattaatgtcttggttttggaagcccgggatagagttggaggaagaacatatactgtgaggaatgagcatgtcaaatgggtagatgttggtggagcctatgtgggaccaacccagaacagaatcttacgcttgtctaaggagctaggcatagagacctataaagtgaatgtcaatgagcgtctagttcaatatgtcaaggggaaaacttacccattccgtggtgcattcccacctgtgtggaaccccttggcatatttggattacaacaacctatggagaacaatggatgaaatgggaaaagagatccccgttgatgcaccgtggcaagcaagacacgctcaggaatgggacaagatgaccatgaaagatctcattgataaaatctgttggacaaaaactgctcgggaatttgcgtatctttttgtgaacattaatgtgacttctgagcctcatgaggtatctgccctgtggttcctgtggtatgtgaggcagtgtgggggcactgctcggatattctcagttaccaatggcggccaggaacggaaatttgtaggtggatctggccaagtaagtgaacagataatgggtctccttggagataaagtgaagctgagctctcctgttacttatattgaccaaacagatgacaacatcattgtagaaacactgaatcatgaacactatgagtgcaaatacgtaattagtgccatcccaccgattttgactgccaagatccactttaaaccagagcttccacctgagagaaaccaattaattcagcgtcttccaatgggggctgttatcaagtgcatggtgtattacaaggaagccttctggaagaaaaaggactattgtggctgcatgatcattgaagatgaggaggctccaatcgccatcactctggatgacactaaaccagatgggtcactgcctgccatcatgggcttcatacttgcccggaaagctgatcgacaagctaaactacataaagacataaggaagaggaaaatctgtgagctgtatgccaaagttctgggatctcaagaagcattatatccagtccattatgaagagaagaactggtgtgaggagcagtactccgggggctgctacacagcctacttccctcctggtatcatgacccagtatggaagggtgattcgccagccagtaggtaggatttactttgcaggcacagagacagcaacacagtggagtggctacatggaaggagcagttgaagctggagaacgagcagctagagaggtgttgaatgctctaggaaaagtcgcgaagaaggatatatgggttgaagaacccgagtccaaggatgttccagccattgaaattacccacaccttcttagagaggaacctgccttccgtgcctggtctgctcaagatcactggtgtttccacttctgtggctcttctctgctttgtattgtacaagattaagaagctcccatgctgaagtttcaccctcaggcctcctgcacgatcatcgcatgtgaaagaaagtgtggataaattacagcctatggtttgggccatttaagtgcacttgatttaaccctcatcagtttaatttcagtctttgtaaagtgataacaatccaaagaatcacctagctaatttccataagaacaagtttcatcctgtttgttagactaatttgtgtgggttgagagaataaaatgttgagtgcttaatttcaaaaagtgaagtgcttctgaggaataatttctgggttcttttgttttctttttgcctttaatgcaaaatagctaattcagaaataaaacacttgacttactgtgacttttgtgtagcgtccaaggtgtacagaggaaaatagtggctgaagtgttccctaggtatcctcactgactagctccatgtgatacacactacccttggcactttcttttctggactgtatctagacatgcattgacccttgtcagtaacattctgtgctgatttaaggaaattagcattattttaatatagtccatagttatctgatcagaggattagatctctaagtctacctgtgtcttcaagatggttatatttttctgttggttgatagtataccattttttctcaattaccaaaggacatatgaaatgttctctattgttatttgttgatacagtcaaatacagaaattaaatttgggctctgtgtgataacatgacttgcttgaattattaggttttatagcagacattaaattggatgattttatatacccaaactatggtctctatcttaggagtgttgtgggtccagaatgatgtctgtcttttctctttcccatctgaaaaattgtcaattaaaaaaacttttcaaaggtttcaaccacaaagcacttctttttctaaaaaaaaaaaa

SEQ ID NO: 167 - DNA, 972 bp, Rattus norvegicus
cccaccgatatccaaaatggcgctggctgctgcgcgtcgcgttctgctgcaggccggatcccgcctcggccgcaggggggccgtggacggcgcgcgtcgcttctctaacaagcgggtgttggtggagaaggagggcgaggcaggaatcgcagtgatgaagttcaagaaccctccagtgaattccctcagcttggagtttctgacagagttcgtcatcagcctggagaagctggaaaatgacaagagcatccgaggtgtcatcctcacttcggagcgcccgggtatcttctcggctggcctggacttgatggagatgtatggccggaacccagcccactatgctgagtactggaaggctgtgcaggagctgtggctgaggctctacttgtccaacctgaccttgatatctgccatcaatggcgcctctccagctggaggctgcctcatggctctcacctgtgactacaggataatggcggacaactccaagtataccataggattgaatgagagcctgctgggcattgttgcccccttctggttaaaagacaactacgtgaacaccatcgggcaccgagcagccgagcgtgcccttcaactggggacgcttttcccaccagcagaggccctcaaggtgggtttggtggatgaggtggtacctgaggatcaggtacacagcaaggctcgctcagtgatggccaagtggttcaccattccggaccattctcggcagctgacgaagagcatgatgcggaaggccacggcggacaacctgatcaagcagcgagaggctgacatccagaacttcaccagtttcatctccagagactccatccagaagtccctgcacgtgtacttggaaaagctcaagcaaaagaagggctgacctaagggtgccacacgggtgtttagttacacgtgccttctaggacccatggtcccaaggattatcaataaggtatttttcaattt

SEQ ID NO: 168 - DNA, 2061 bp, Rattus norvegicus
aacacaccagggaagtggcaaccctgaacatcaggagtcggcaatcacagaggctggcagctggctggtatcggctctgcagcctgaagactggagaagatgacccgccttgtgacttggagctcttgatggatgggatcggctctgctctcctctccttcccagattgcatactgggagaggacactctattccatgaagaccaagacaaggggacacaactggacagtctcacattggcctccatcaatactgactttgccttcagcctctacaagaagctggctttgaggaatccacataaaaatgttgtcttctccccacttagcatctcagccgccttggccgtcgtgtccctgggagcaaagggcagcagcatggaagagattctagaaggtctcaagttcaatctcacagagacccctgagacagaaatccaccggggctttggacacctcctccagaggctcagccagccaagggacgagatacagatcagtacaggcaatgccctgtttattgaaaaacgccttcaggtcctggcagagttccaggagaaggcaaaggctctgtaccaagctgaggccttcacagctgatttccagcagtctcgtgaggccaaaaagctcatcaatgactatgtgagtaaacagacccaggggaagatccagggactgatcacaaacctagctaagaagacatccatggtactggtgaattacatctactttaaaggcaaatggaaggtgccttttgaccctcgggacacattccagtctgagttctactctggcaaaaggaggtctgtgaaagtgcccatgatgaagcttgaggacctgaccacaccctacgtccgggatgaggagctgaactgcactgttgtggagctgaagtacacaggaaatgccagcgccctgtttatcctccctgaccagggcaagatgcagcaggtggaagccagcttgcaaccagagaccctgaggagatggaaggactctctcaggcccagcatgatagatgagctctacctgcccaagttctccatctctgctgactacaacctggaggacgtccttccagagctgggcatcaaagaagtcttctccacacaggctgacctgtctgggatcacaggggataaggacctgatggtctttcaggtggtccacaaggctgttctggatgtggctgagacaggcacagaagcagccgctgccacaggggtcaaatttgttccaatgtctgcaaaactggaccctctgattatagctttcgaccggcctttcctgatgattatctctgacacagaaactgcaatagctccctttttggccaagatatttaaccccaaatgagattcgaacttcccaagagttgatgcttctcctgaggcattgagcctgtctgtgggtctctgtgtgcattttcgcttctatgctgtgattggccatggcggcatgcctggatgagacagtaactaactgtgtaacagtcctcatgtacagacgcctgtgcagagtcgctgccatgctcccaaacttcttggtaccactagctcatatttctgagcctaaaatttgtctttcccctgcccttgctctctctcccctgtatctgcctcaacccagaagccagggccccatcaggttgtctcagtcccaacttaggctctagttatatcttccttcagcgttgctgtcttgatgggactgtgcacgattaccggccaacccacatggaccaagaagaacacttgctggtccctatctttctgcagtatgtgggaatcacttggtgcccagtgctgcctcactatttccttcctctgggcacagtgctccttgcagcactggcctgactttgtccacatctggcacagagctggagccctcccttctgcagatgcatggcacctgtgggtcagaccagatccccctccccagcactcctacttagagcaatgcagcctttcttttagttcccagctgaccaacctcacacaaaagatgaccaacaacaaccaaaatgaagaggtaggagcaaaggatcaataaacacatc

SEQ ID NO: 169 - DNA, 1521 bp, Rattus norvegicus
gtttgtggtggggctgcggagtcgccgatcccgccggaagcgccaggacaatggggacccgggacgacgagtacgattacctattcaaagtggtgcttattggggactcaggtgtaggtaagagcaacctgctgtcacgcttcaccagaaacgagttcaacctagagagcaagagcaccattggagtggagtttgccactcgcagcattcaggtggacggcaagaccatcaaggctcagatctgggatactgctggccaggagcgctaccgtgccattacctctgcgtactaccgtggtgcagtgggtgcactgctggtatatgacattgccaagcacttgacatatgagaatgtggagcgctggctgaaggagctgcgggatcatgcagatagcaacattgttatcatgctggtgggcaacaagagcgacctgcgccatcttcgggctgtgcccactgacgaggcccgtgcctttgcagaaaagaacaacttgtccttcattgagacctcagccttggattccaccaatgtagaggaagcattcaagaacatcctcacagaaatctaccgtattgtgtcacagaagcaaattgctgaccgtgcagctcatgatgagtcccctggcaacaatgtggtggacatcagtgtgccacccaccaccgatggacagaaacccaataagctgcagtgctgccagaacctgtgactgccctgcacctccacccagcgtgcgtgcacgtcctcggtccttggccagcccctcaccagtgtcctcccggcccctcccttgtccctctaggacaggctgctcccaccctccaagtgagctccgcctgccagcccgatggcccaggaagagcaggagtccagtggcctctcctgtcctgcctgcttgagagaagctagaagccccttgcttatgtacctgctcttggatattgtgggcatcttgacagggtagggaggttggtaggatggacaggaccagccagaggtgaggaagatgagtggaaggagccggcttctcctgttttccatgtcagactccagggagcaatcacctccttccctctctggccaggtgacccagctggccctgcatccccaccccaaaccctctctgagctgatacccgaagagccaggcatcaggggctgagcaggtggacattctgggctctgcctcctgcctacaccaccatagccagcgccagcgccagcgccagcacggcctccagcattcccaggcctgcgcactcctgctcctgcctgtagatttatgctgggagaagacacccttgcccccctccttcctcctctgcacgcagcgctctcctctgcccgtccccacttctcttgtctcgtctccttgtctggtcaggaacctgtctgcaagtgaagcaatatctccgtgttttgtatatacaactgctcttgtagcctttggttttttgttattgtagagaaacacagattctttatacactttgtaaaatttacgccaaaaaaaaaaaaaaaaaa

SEQ ID NO: 170 - DNA, 1292 bp, Rattus norvegicus
tcctagtgttacaggacatggagaaggaacgggagacactgcaggtctggaagcaacgtgtgggacaagagctcgattctgtgatcgctttctggatggagcattcccatgaccaggaacacgggggcttcttcacatgccttggccgcgatgggcaggtatatgatcacctcaaatatgtctggctgcaggggaggcaggtatggatgtattgtcgcttataccgcacttttgagcgcttccgccgtgtcgagcttctggatgcagcaaaagcaggtggtgaatttttgttgagttatgcccgggtggcaccgcctggcaagaaatgtgcttttgtgctgacccaggacggccgtccagtgaaggtgcagcggaccattttcagcgagtgcttttacaccatggccatgaatgaactgtggaaagtaacaggggaaatgcattatcagagagaagccgtagagatgatggatcagatcatccactgggtaagggaggacccagctgggctgggccggcctcagctctcgggaacactggccacagagcccatggcagtgcccatgatgctgctcaacctggtggagcagcttggagaagaagatgaggagatgaccgacaagtatgcagaactaggggactggtgtgcccataggattcttcagcatgtccagagggatggacaagttgtactggagaatgtatcagaggatggcaaagagctccctggttgccttggaagacatcagaacccaggccacacactggaagctggctggtttctgctccagtatgccctcaggaaaggtgatcccaaacttcaaaggcacattattgacaagtttctcttactgcctttccactctggatgggaccctgagcacggaggcctcttctacttccaggatgctgatgatctctgccctacccagctggaatggaacatgaagctgtggtggccacacactgaagccatgattgccttcctcatgggttacagggacagcggggacccagccttgctgaacctcttctaccaagtggctgaatacaccttccaccagtttcgtgatcctgagtacggggaatggtttggctacctgaaccaagagggaaaggtggcccttaccatcaaaggaggtccttttaaaggctgcttccatgtgccgcggtgcctggccatgtgcgagcagattttgggagccctactccaacgccttgggcccgcccccctcggctccttgcccgctgtccccactcgcgaaggctcgaaataaagctgaccctgttcc

SEQ ID NO: 171 - DNA, 2540 bp, Rattus norvegicus
ccgcggcccactacagcagtcgcccgccgtcagcctcccgcgctcgtctctcgtcactgctgctcggcgtccattgctgcctctccccgcagtcgccgacgtcgcttccccgcgcgctcccacaaccgccgccccgccggtcagtgaagccggtgagccattccccgcgccggcccccagaggcgggcatccagccggaccccgagtgtggccctctcctgctgtggccgtccgcgccttctcgaccgcttatccagcatgaaaaccaagttctgcaccgggggcgaggccgagccgtccccgcttgggctgctgctgagctgcggtggcagcgctgccccgacgcccggcgtagggcagcagcgcgatgccgcaggcgagctggagtccaagcagcttggtggccggtcccaacctctcgcgctgccgccgccaccaccgccgcccctgccgctgcccccgccgccatcaccgccgctagcggacgaacaacccgagccccggacgcggcgcagggcctacctgtggtgcaaggaattcctgcccggagcctggaggggccttcgcgaggaccagttccacatcagtgtcatcaggggtggtctcagtaacatgctgttccagtgttccttgccagactccatagccagtgttggtgatgaacctcggaaagtgctcttgcgactgtatggggcaatcttaaagatgggggctgaagcaatggttctggagagtgttatgtttgccattcttgcagagaggtcacttgggccaaaactctatggcatctttccgcaaggccgactggagcagtttatcccgagccggcgattggacactgaagaattatgtttaccagatatttctgcagaaatagctgaaaaaatggccacatttcatggtatgaaaatgccattcaataaggaaccaaaatggctttttggaacaatggaaaaatacctgaatcaagtactaagacttaaattcagcagggaggccagagttcaacaactgcacaagttcctctcttacaatctgcctctcgagcttgagaacctgaggtcattgctgcagtatactagatccccagttgtgttttgtcataatgactgtcaagaaggtaatatcttattgttggaaggccaagagaattctgaaaagcagaagttgatgctcattgactttgaatacagcagttacaattacaggggatttgacattggaaatcatttctgtgaatggatgtatgattatacctatgaaaagtatcctttcttcagagcaaacattcagaagtatcctacccgaaaacaacagctccattttatttcaagttacttgactacattccaaaatgattttgaaagcctcagcagtgaagagcagtctgctacaaaagaagacatgttgcttgaagtcaacagatttgcccttgcctctcatttcctctggggactttggtccattgtacaggccaagatctcatccattgaatttgggtacatggaatatgcccaagccaggttcgatgcctactttgaccagaagaggaagcttggtgtgtgaatggatggctccactcttcaccactggactgcaggaggtggctgcaccaggccctcagtggagcgctgctgtgaccactgccctgggcagaaggcctggacgtctcactactgagcaccgatgtgtatgatactacagactatattaaagtggagtaacatttctttcatctttgtttacactctcactaggactctgaaccatgattggaagcagaaatatagtgtgatagtgcaatagctcagaccccgcctaagcgggaggcctttcagctacatggctacagcttcagccacttaggccccagccagacagagcagtgctgtgtgggtactgagtgctgacttaggatattaatgtgctgcaacacgttcatgaccaggctttgaaggtgacagtctgacaatgtgttggagacactctgaagggcaagtgaacagacatactgtgaaatggctcgacaggaggagcctgaattgtggggtctgtggaggcagccagctgtttctgtacagggtacacttgactatgggtatgcatctgcaggcagtagctgcagccctcctgtgcctgtgtacacatgactacaggggccagtgtcactgactggccataactgcagtgtctcctaactgggtgtgctttatgcttcagcttcccggggaggagcagtggagccagcttcctcaccccttcttgccttctctctgcctgacctggaacttgggctttcgcccattgccctctgaagctgcttcccatctgatgtcactgggagacagcagctgtatgtgtggggtattggggtgcaggtagattagagctgtgaaatccatgtacattaatacccaatgggataaacctagaatttttttttttttactctgaactctgaattgttttgtgcacatatttctgctaccaccgaaactgtattatacagataaataaacaacttgaaacttaaaaaaaaa

SEQ ID NO: 172 - DNA, 1786 bp, Rattus norvegicus
gtaggtcaaacgcagatcaggtttattgctgtcgtttatttcttattcacgtattaattttttacttatttggcacggtttgggagacggctgggttaagaaaactggtacgggaaaggagagaaagagggaaaagaaggaactaggagcagaggaagagaaacggagctccttccttgttcttattagagaacccaatatggcatctttcatgaggagcttattttctgaccacagcagatatgttgaatcttttcggagatttctaaataattcaacggaacaccagtgcatgcaggaattcatggataagaagcttccaggcataatagcaaggattggagaaacaaaagcagaaattaagattctgagtataggcggaggtgcaggtgaaattgaccttcagattctctccaaagtccaggctcagtacccaggaatctgtattaacaatgaagttgtagagccaaatgccgaacaaattgtcaagtacaaagagcttgtagcaaagacatcaaacatggagaacataaaatttgcttggcataaggagacatcatctgaatatcaaaaacgtgtagtggaagaagacgaagaacctccaaagtgggactttattcatatgattcagatgctatattatgtaaaggatatcccagccaccctgaaattcttccacggtctcttagctgccaatgctaaaattctcattattcttgtgtcaggaactagtggctgggaaaagctatggaaaaaatatggattccgcctacccagggatgacctctgccagtatgtcacatcttctgatcttgctcagatactggacgacctgggtattaagtatgaatgttacgaccttttgtccactatggacataacagactgttttattgatggtaatgaaaatggagacctgctttgggattttttgacagaaacctgcaactttatcaaaacagcaccactggacctcaaagaggaaattatgaaagatcttcaagagcctgaatttagtgttaagaaagaggggaaggtacttttcaacaacaatctgagttttatagtggttgaggcaaatgtataagtcatgagtattcagaactcatattttgaccaaatgctgatttatttacatattaaatacatattatttaaatattgaagttaaaattaatcccataatagaatacaatattatttcttataaatgaaatctacaagtttccaagacaacttagactttctaagaactgagccacttccagttgtgaccttaaaagctaatactcaggctaaacactgcccaactggaaacatgagacttgagtttcattagcttactgatagtaaagttctttccattttcttagtgtactggaaatttttagaatagtaataaaatatgtgtcatccattcttttgagtaaggtgatatttattgattctctgttgacaaaacctaaatatttctctacttgtacagagtgttaatcttctcactttcttctacagtagtttctatcatatgttttattaatagcatcagaaaatcatgggctggtgggatggttcttccaaaggacctgctagggttcagtttggaacatgcatgtgctgtaccttctaaccatttatgatgtcatctttagggaatctgatgtcatatactggcctctctgggagtcaacacttatgtgtacataccctaccccacatacataattaaaactaaaataaatatttaaaggattactataaaaaaaaaaaaaaaaaaaaaaaaagg

SEQ ID NO: 173 - DNA, 1062 bp, Rattus norvegicus
ggggggctgttttttggctcctgcgcttgttcttccctgtgcactccgcaaagatgcagctgaaaccgatggagattaaccccgagatgctgaacaaagtgttggccaagctgggggtcgccgggcagtggcgctttgccgacgtgctagggctggaggaggagactctgggctcagtgccatctcctgcctgcgccctgctgctgctgtttcccctcacggcccagcatgaaaacttcaggaaaaaacaaattgaggaactgaagggacaagaagttagccctaaagtttacttcatgaagcagaccatcgggaactcctgtggtaccattgggctgatccacgcagtggccaataaccaagacaagctggaatttgaggatggatcagtcctgaaacagtttctgtctgaaacggagaagttgtcccctgaagacagagccaagtgtttcgagaagaacgaggccattcaggcagcccatgactccgtggcccaggagggccagtgccgggtagacgacaaagtgaatttccattttatcctgttcaataatgtggacggccacctctacgagctcgatgggcgaatgcctttcccggtgaaccatggcgccagttcagaggactctctgctgcaggatgccgccaaggtctgcagagaattcactgagcgcgagcagggagaggtccgcttctccgcagtggctctctgcaaagcagcctaagtagggagagagaaccagccgctcccccatccctgggcaggtgcgcgctgccctgcccttggtttgcagctttagcacttaacaaccacagctgtcttcttgcgttctactgccccgtcccctccaccccacccaggccaccagggagctctgtgacagccacaccagtgtgaacttcagaggctaagctcttaccctcctgtgtcttgtaccttgctctctatggtctctttggtttctgtaagttacggccttggatgtggtttgtctagtcctcaagaggaagaataaaacttttctgctggcgaaaaaaaaaaaaaaaaaaaaaaaaaaaaaa

SEQ ID NO: 174 - DNA, 1137 bp, Rattus norvegicus
gggggtgtgtgtgtgtgtgtgcgctacggggtgtagactgtgtctgaaatagcgggaacgccatgtcccgtggttccagcgccggttttgaccggcacattactattttctctcccgagggccgactctaccaagtagaatatgcttttaaggctattaaccagggtggacttacatctgtagctgtcagaggaaaggactgcgcagttattgtcacacagaagaaagtacctgacaaactactggattccagcaccgtgactcacttattcaagataacggaaaacattggctgtgtgatgacaggaatgacagctgacagcagatcccaggtacagagggcacgctatgaagcagctaactggaaatacaaatatggctatgagattcctgtggacatgctgtgtaaaagaattgctgatatttctcaagtctacacacagaatgctgaaatgaggccacttggttgttgtatgattttaattggtatagatgaagagcaaggccctcaagtgtacaagtgtgatcctgcaggctactactgtggctttaaagccaccgcagcaggagtgaagcagacagagtcaaccagcttcctcgaaaaaaaagtgaagaagaaatttgattggacatttgaacagacagtggaaactgcaatcacatgcctgtctactgttctgtcgattgatttcaaaccttcagaaatcgaagttggagtagttacagttgaaaatcctaaattcaggattcttacagaagcagagattgacgctcaccttgtggctctagcagagagagactgaacactcttatcagcttaccagatccatgatgccatgtgcctatgtgtttagtaacaacaaaccgacatcttagaggccctggattgaagatggaaactctcccactcctcctgccactgactggttaggactctgtataaataaaacagtgcttttggaaaaaaaaaaaaaaaaaaaaaaaaaaaaaaaaaaaaaaaaaaaaaaaaaaaaaaaaaaaaaaaaaaaaaaaaaaaaaaaaaaaaaaaaaaaaaaaaaaaaaaaaaaaaaaaaaaaaaaaaaaaaaaaaaaaaaaaaaaaaaaaaaaaaaaaaaaaaaaaaaaaaaaaaaaaaaaaa

SEQ ID NO: 175 - DNA, 2934 bp, Rattus norvegicus
gcggacagctggttggcgcttggaccacgccgcagcagcaggtccctccacgtgctttcggcggcgccatggaactggaggagtcggggatccgtgaggaatgtggtgtgttcgggtgcatcgcttctggagactggcccacgcagctagatgtgccacatgtgatcactctgggactcgtggggcttcagcaccgaggtcaggagagcgctggtattgtgaccagtgatgggagttcagtgcctaaattcagggtgcataagggaatgggccttgtaaatcatgtttttaccgaagacaatttgaagaaattgtatgtctcaaatcttggaatcggacatacgcggtacgccaccacagggaagtgtgagctggaaaattgccagccgtttgttgttgagactctgcatgggaaaatagctgtggcccataacggagagctggtgaacgcagctcggctgaggaagaagcttctgcggcatggtattgggctttccacatcctccgatagtgaaatgattacccagttactcgcatatacccctcctcaggaacaagatgatactccagactgggtagcaagaattaagaacttaatgaaggaagcgcccgcagcctactccctggtcataatgcacagggacgtcatttacgcagtgcgagatccatacggaaatcgtcctctatgcatcggccgtcttatgccagtttctgacataaatgacaaagagaaaaagtcttcagagactgaaggatgggtggtgtcctcagagtcttgcagctttttatctattggtgcgagatattgccatgaagtgaagcctggggaaattgtagaaatatccagacatggtgtcagaactcttgatataattccaaggtctaatggagacccagtggctttttgtatcttcgaatatgtttattttgcaagaccagatagtatgtttgaagaccagatggtttatacggtaaggtaccggtgtggccagcagctggcagttgaagcaccggtggaggcggacctggtcagcacagttccagaatctgccacgcctgcggccctggggtatgcgacaaagtgtgggctgccatatgtggaggtgctgtgtaagaaccggtatgtaggaagaaccttcattcagccaaacatgaggctaagacaacttggggttgcaaagaaattcggcgtgttgtctgacaactttaaaggcaaaagaattgttctcatagatgattccattgtgagaggcaatactatctcacccatcataaaactcctcaaagaatccggtgcaaaggaggtacacattcgagtcgcttcgccaccaataaaacatccgtgcttcatgggaataaacattcctacaaaagaagagcttatagccaataagcccgaatttgagtatcttgcagagtaccttggagcaaacagcgttgtgtatctgtcagtggaaggactagtttcgtctgtgcaacaagaaataaagttcaagaagcagaaagttaaaaagcgtgatatcacaattcaagaaaatggaaatggtctggagtattttgagaagacgggacactgtacggcttgcctcactggccagtaccctgtggatctggaatggtagctgcctggaccgatgtgctgcttccagactgaaaggtcatcaagaagtggtttacatgtgttcctcagttggtacaaaatggacaccacttgcttatgtattataccttaagttttgagattttctgaggtcactgaattgctataattgaatcataaagattacatgtaatgcgacatgtggggattctttttgtataaggactgacttttcacccaagagaaggcaggaagtggcatttcccagacccatgcttgaatggttctaaagaggtgagatagggaggttgtgtgcccaggacaggaagctttataaagtttcatgaaaagcttgaattcattgtgccccatatgtatctagtctatgcagtcaagtctgcagttatggccttggtctttgattcttccaccccatacacacatgtatggctctggggaccagtgtacaactcctaaaaaatgaaaacctatgtggaaagctgaggcaggagagtcctgagttcaaggccaacctgggttttcctgtctcaagataaagaacctctttctgtgcctcggactccacatctgtttcctaagtcattcataaacttaatgcttagcgggaacttgtgtgtttgtctgggaggcttagagctgccgttttacccctgcttctttaccatgcatggtcagtagcttcagaagctaatggtaattagctttcactaaattagttttcagtttccttgtgatggaggtttgcagaccttttccatctctttgggatataccagaacgactgagaaatctatctggagccctgtttttctacacttgacagaaaatatttagcctagcaaataacttagtaagtacattggaaagagaaaattttaatttcaagtaagcctttatccttgatttgattaaacttggctgtttgaatgagtgcttgatcatttacagaactgtgtacttgtatacatgtatgcatttggtttaaacagagggaatagagacacagtagggccgattttgtttaaaggctgaggggacagccactgtttggggaattagattgcctgtacccaagcgttagctcatgatcatgttttttctaattttttttgttaggtctagtgacatttttaatttttttatgatgcagatttagtggattgaggtgatttactaactcctgtttgtgtgggatttttcacatggaaaaataattgtctctatattgccaaaatttgctactttccaaacccacttagaaatataatatttattaaaaactgaaatcattagcccacatttggtatatagtg

SEQ ID NO: 176 - DNA, 485 bp, Rattus norvegicus
gcttgtctcgagcgagatggcttcaaggttacttcgcggagtaggcgctttggcggctcaggccctgagggcccacggaccccgtggcgtggccgctacccgctccatggcttctggaggtggtgtccctactgatgaggagcaggctaccgggctggagagggagatcatgatagcagcacagaggggactggatccatacaatatgctacctccaaaggcagcttcgggcaccaaggaagaccccaatctagtcccatccgttagcaacaagagaatagtgggctgcatctgtgaagaggacaactgtactgtcatctggttctggctgcaccaaggcgagagccagcgatgccccaactgtggaacacattacaagttggtgccctaccaaatggtccactgagcccacccctggtttaacatttcagaatgtaaaggaaaacgtctctcaataaagactagccaacgcactggctccttcc

SEQ ID NO: 177 - DNA, 929 bp, Rattus norvegicus
cctaaaccagctccagcactccagactccagccacactccaacagagcaccatggtctcagccacccgctcgcttctctgtgcagcgctgcctgtgctggccaccagccgccaagccacaggggcgcccgtcgccaatgagctgcgctgtcagtgcctgcagacagtggcagggattcacttcaagaacatccagagtttgaaggtgatgccgccaggaccccactgcacccaaaccgaagtcatagccacactcaagaatggtcgcgaggcttgccttgaccctgaagcccccatggttcagaagattgtccaaaagatgctaaagggtgtccccaagtaatggagaaagaagatagattgcaccgatggcgtctgtctggtgaacgctggcttctgacaacactagttttacacattttacgatttctattgagggtcctatttattttatgtatttatttattccaccaagtgtgtggtttttattttacattaatatttaacgatgtggatgcgtttcatcgatggtcgttcaattccaattgtgcagtttaaagatggtaggcgttaaatatctcgttaaattaatatttattgggagaccattaggtgtcaaccactgtgctagaaggtgttgagcgggaagaagggcggagagatgagagtctgggatcgtgttttgtgttagggtgaggaatgtgtgagaggctatgttgtatgttttgaaagaatgttatttattgaaagttgtctttcatattttatggtcaacattgatgtgttgaagcttcccttggacattttatgtctagtttgtagggcacaatgccttttatattctttaaccaatgctccttctcgtctcaggacagagaagttcaaaggactgttacaaatgaaataaaaataaaagttttattaaaaaat

SEQ ID NO: 178 - DNA, 1215 bp, Rattus norvegicus
gaattccggcagtcctgtcctgcagtcgcctgcctcttcttttttgctttcaacatgacagatgccgctgtgtccttcgccaaggacttcttggctggtggagtggccgcggccatctccaagacggcggtagcacccatcgagcgggtcaagctgctgctgcaggtgcagcacgccagcaagcaaatcacggcagataagcaatacaagggcatcatagactgcgtggttcgtatccccaaggaacagggagtcctgtccttctggcgtggcaacctggccaatgtcatcagatacttccccacccaggctctcaactttgccttcaaagataaatacaagcagatctttttgggtggtgtggacaagaggacccagttttggcggtactttgcagggaacctggcatcaggtggtgctgctggggccacatccttgtgctttgtgtaccctcttgattttgcccgtacccgtctagcagctgatgtgggcaaagctggagctgaaagggaattcaaaggccttggtgactgcctggttaagatctacaaatctgatgggattaagggcctgtaccaaggctttaatgtgtcagtgcagggcattatcatctaccgtgctgcctacttcggtatctatgacactgcaaagggaatgctcccggatcccaagaatactcacatcttcatcagctggatgattgcacagtctgtcactgctgttgctggcctaacttcttatccttttgacacggttcgccgtcgtatgatgatgcagtctggacgcaaaggaactgatatcatgtatacaggcacgcttgactgctggcggaagatcgctcgagacgaaggaggcaaggcctttttcaagggtgcatggtccaacgttctcagaggcatgggtggtgcctttgtgcttgtcttgtatgatgaaatcaagaagtacacataattatgtcctaggtgttctccccgagaacaggcatgttgtataatagaccatattcttgaacattctggacagattctctgggcttgtctgttttatcaatggcaactatttaccagttgaaaagtggaagcaataatattcatctgaccagttttctcttaaagccatttccataatgacaataatgatgggactcaattatattttttatttcagtcactcctgataataaaaaattgaagaaataaaaatatcccggaattc

SEQ ID NO: 179 - DNA, 462 bp, Rattus norvegicus
cttgaggagcttgagcaatttgccaagacttttaaacaaagacgaatcaaacttggattcactcagggtgatgttgggcttgctatggggaaattatatggaaatgacttcagccaaaccaccatctctcgctttgaagccttgaacctcagctttaagaacatgtgcaagttaaagccccttttagagaagtggctaaatgacgcggagaacctctcatctgattctacagcatctagcccaagtgctttgaattctccagggttgggggctgagggcttgaatcgtaggaggaaaaaacgcaccagcatagagaccaacatccgtgtggccttagaaaagagtttcatggagaatcaaaagcctacctcggaagatatcaccttgattgctgaacagctcaatatggagaaggaggtgattcgtgtttggttttgtaaccgccgccagaaggagaaaaga

SEQ ID NO: 180 - DNA, 581 bp, Rattus norvegicus
ttctgctggagacaggctccgccgggggtcggtgaagtatccaagatggctgggcgcaaacttgctctaaaaaccatcgattgggtatcttttgtggagatcatgccccaaaaccagaaggcaattggaaacgctctgaagtcctggaatgagaccttccacaccaggttggctagtctgtctgagaaaccaccagcgattgactgggcttactacagggccaatgtggacaagcctggcttggtggatgattttaaaaacaagtataatgctctgaagatccctgtgcctgaggataaatacacagccctagtggacgccgaggagaaggaggatgtgaagaactgtgcccagttcgtgactggatctcaggctagggtccgggaatatgagaagcagctggagaaaataaagaacatgattccctttgaccagatgacgattgatgacttgaatgaggtcttccctgaaaccaagctggacaagaggaagtacccatactggccccatcagcccatcgagaacctgtgaagcagcccaggagggagccctggctgacttgaataaacatttacatagtc

SEQ ID NO: 181 - DNA, 833 bp, Rattus norvegicus
gaattccaaaatatgtaaggctttcaatttattacagatcacccaagaacataatgatatacatgtagtcagaaaacacgatgtagaaatcatagtgagttgtccagacatggtcagtagattattctttctggcatgctccagtgtcaacactcaataaagagcactaaaatccttccatacaattaagtatcagcgatgtaccatattgcagaaaggggtggctgagcaacagtttgttgatactataagacttccatgctcaacagtcgtagcgttgcactcagcacagctctggtttccatatacaaattttccatctcgagtggttactacaacccaggcacaaatctcatcaggataagtctgacatttctgtcttccaacatgacaaaatcctgtagaatcgaagctagtacgctcggtgtctggggtatgagggtcctgcaaacccgaggcttcggctcggactcgtcggagagcatggattcgggcgctggctccatccgagaagctggtggggccttcgggaaacgagagaaggctgaagaggatcggtacttccgagagaagactagagagcagctggctgccttgaagaagcaccatgaagatgagattgaccaccattcgaaggagatagagcgtctgcaaaaacagatcgaacggcataagaagaagattaaatacctaaagaatagtgagcattgagtgcacacagtcagtctctcacagagtggccagtatcattccccacttctatagagattgttttgaatgattgatgtttgacctgtgtgctactaacagataataaattatcaccggaattc

SEQ ID NO: 182 - DNA, 593 bp, Rattus norvegicus
gcccctcacccctgaaaaatgtatgcctgctccaagttcgtctctacccgctccctgatcaggagcacctctcagctgctgagccgtccgctctctgcagtggagttgaagcgaccacagatgcccacagatgagggcctcagttgcttggcagtccggcggcctctgacctcgcttatccctagccgcagcttccaaaccagcgccatttcaagggacattgacacagctgccaagttcattggagctggggctgctacagttggggtggccggttctggagcaggaattgggactgtttttgggagtctcatcattggctatgccaggaacccctctctgaagcagcaactcttctcctatgcgattctggggtttgccctctctgaggccatggggctcttttgcctaatggtggccttcctcatcctcttcgccatgtgaagcagctgtctccacgtccacctcccatggttcttccgtgtctcgtctgcccagtgtgttccttttcctgtgcctccccaacaagtctggggaaagtacttggctcagggtttgacagagagaagacaaataaatactgtattaataag

SEQ ID NO: 183 - DNA, 1564 bp, Rattus norvegicus
cagctgataggcttgcaaagaccctaaccctatcatcgacggccgcacagacgtgaacctggcctacctgggtgccaagcctaggagcctgcagacgggctattgcaaccatactccccccggaacccaaagacttgcgggattggagagcgaccgcagagagccctcagagctctacccgccgccggcctagtcaccatcacaccccgggaggaggccgcacgtgccgcagccggccccagtcaccatcaccgcaaccatgagcagcgagcccgagacccagcagccgcccgccgcccccgccgccgccctcagcgccgccgacaccaagcccggctccacgggcagcggcgcgggtagtggcggcccgggcggcctcacatcggcggcgcccgccggcggggacaagaaggtcatcgcaacgaaggttttgggaacagtaaaatggttcaatgtaaggaacggatacggtttcatcaacaggaatgacaccaaggaagacgtatttgtacaccagacggccataaagaagaataaccccaggaagtaccttcgcagtgtaggagatggagagactgtggagtttgatgttgttgaaggagaaaagggtgcggaggcagctaatgttacaggccctggtggagttccagttcaaggcagtaaatacgcagcagaccgtaaccattatagacgctatccacgtcgtaggggtcctccacgcaattaccagcaaaattaccagaatagtgagagtggggaaaagaatgaaggatcggaaagcgctcctgaaggccaggcccaacaacgccggccctatcgcaggcgaaggttcccaccttactacatgcggagaccctatgcgcgacgaccacagtattccaacccccctgtgcaaggagaagtgatggagggtgctgacaaccagggtgcaggagagcaaggtagaccagtgagacagaatatgtatcggggttacagaccacgattccgcaggggccctcctcgccaaagacagcctagagaggatggcaatgaagaggacaaagaaaatcaaggagatgagacccaaggtcagcagccacctcaacgtcggtatcgccgcaacttcaattaccgacgcagacgcccagagaaccctaaaccacaagatggcaaagagacaaaagcagccgatccaccagctgagaattcgtccgctcccgaggctgagcagggcggggctgagtaaatgccggcttaccatctctaccatcatccggtttggtcatccaacaagaagaaatgaatatgaaattccagcaataagaaatgaacaaaagattggagctgaagaccttaagtgcttgctttttgcccgttgaccagatccactagaactgtctgcattatctatgcagcatggggtttttattatttttacctaaagatgtctctttttggtaatgacaaacgtgttttaagaaaaaaaaaaaaaaggcctggtttttctcaatacacctttaacggtttttaaattgtttcatatctggtcaagttgagatttttaagaacttcatttttaatt

SEQ ID NO: 184 - DNA, 1888 bp, Rattus norvegicus
cttgcagagcgctgacctagctcccagacctcagcaggatggaagacaagctgaagaaggccaagatcatcttcgtggtgggcgggcctggctcaggaaaaggtacccagtgtgagaagattgtgcagaaatatggctacacccacctctctactggggacctgcttcgggcagaagtcagctctggatcgtcgaggggcaagatgctgtcatctatcatggagaagggagagctggtgccactggagacggtgctggacatgcttcgggatgctatgttagccaaagtggactcttccaacggcttcttgattgacggctacccgagggaggtgaaacagggagaagagtttgaacggaagatcgcacagcccacactgctactgtatgtggacgcaggccccgagaccatgacccaacgactcctaaagcgaggggagaccagtggccgtgtggacgataacgaggagaccatcaagaagaggctggagacgtattacaaagccacagaacctgtcatctccttctatgacaaacgcggcattgtgcgcaaggtcaatgctgaaggctcagtggacactgtcttctcccaggtctgcacctatcttgactccctgaagtaactggatccctcggccagttcccagcccaccccgcccttgccccctgaccccaggcagcctggctcgagcccagcacctccaccctgccgggctgtgcacagacacaggaagctattatcctgtcccatggacatttgagcactaaagaaattgccaaggacgcttagggttgttccctcttcttgcttccaaccgaggtgattcatgctgccacagccggaggctccagcgctgccggcccattttttcctgtgcctcagcccagctgtcttgtctccctctggctctgctgggatcctaggcccttccttagccagcccatgtcaagcctaggggcccctgggttgataggctgctccttggggtctggtgttccccctctatttctcatggccttgtcgtacggctttggccctaagccatcatctctctggagtgagctcctttccttttttttcttttttcttttctttctttttcttttctttttttcttttcttttcttctttttttttctcttttgacagcattttgtgtgacttaagctggcctcaaacctgttctgtaactgaggacaaccttgatcctcctgcctccacttgtcttcctatgtgctgagattacaggtgtgtgtacctccaccactcctggtttatggggtgctggggatcaagcccatggccctgtgtacattaagccagcaccctacaaattgagctacatccccaggctgaacaggttttctatgcctgactggggcctgggctgcaatgggcaaagggtcatgggctcaccagctggggccaccctttggctggttctaagacttgttctttcatgctgtgtcccaaccctcacccaaggcattaggacaagaacatacagattaaggagtgcgagttgccatggacgtggatgtgggatcaaggacgattctgggacccagaggattcccagaagagctggcagctctctccagttctttactctttgatctcattacacaggaaggctctgttgatactcacctgtccttggaccctgtccccatccctagtgacttcccctgtgagcccagagagcctgtaagccagcagccatggctgtccgggggacacctgcccctgggggtgatggtgctcactcctttctgtttactgccactggggccacctttccttctgcattgcctatttaagctgtcctttaaaataaacaaatgtatttcagttataaaaaaaaaaaaaaaaaaaaaaaaaaaaaaa

SEQ ID NO: 185 - DNA, 1609 bp, Rattus norvegicus
ctcgagatccattgtgctctaaagctccgccccacatgagcagttttcactccactaaacatacagagttcgaacagaattcatgaagacagaaatttaatcacttaattttggcctatatcttttcaaaatatttttcaaacgaacttattatataaagtagctatattgcttgtaggaagaaaaacaaaaaccaaagatgtggccacaaaagaaatagaccagactaaaaccaagacggggggaaaaaaatcctctaaagcaaagcccagaggagttagcaaagggttaaaatccttttgattgacgttgtagcctccggtgccctgggctcaggcgcgcgccattggccgccagaccttgtgcctggcggccaatgggggggcgcagtccacgagcggtgccgcgtgtctcttcctcccattggctgaaagttactgtgggaaagaaagtttgggaagtttcacacgagccgttcgcgtgcagtcccagatatatatagaggccgccagggcctgcggatcacactggatctggagctggtgctgataacagcggaatcccccgtctacctctctccttggtcctggaatagcgctaccgatcacaaagtagccctaagacataataaaccctcaactgctccgtagtttttcttatgaaagccaagtaaaggggacgtaagcaaaaaaatatttttttttgcgtgaaggattccaaaaataaaattctctggggattgagaagaaagaaaaaaaggaaaatgccagctgatataatggagaaaaattcctcgtccccggtggctgctaccccagccagtgtcaacacgacaccggacaaaccaaagacagcctctgagcacagaaagtcatcaaagcctatcatggagaagaggcgccgggcaagaataaatgaaagtttgagccaactgaaaacactgattttggatgcacttaagaaagatagctcccggcattccaagctggagaaggcagacattctggaaatgacagtgaatcacctccggaacctgcagtgggcgcagatgaccgccgctctcagcacagacccgagcgtgttggggaagtaccgcgccggcttcagcgagtgcatgaacgaggtgacccgcttcctgtccacgtgtgagggcgttaacaccgaggtgcgcactcggctgctgggccacctggccaactgcatgacccagatcaacgccatgacctaccccgggcaggcgcaccccgccttgcaggcgccgccgccgccgcccccgtcaggacctggcggtccccagcacgcgccattcgcgccgccgccgccgcttgtgcccatccccgggggcgcggcgccccctcccggcagcgcaccctgcaagttgggcagccaggctggagaggctgccaaggtttttggcggcttccaagtggtgccggctcctgacggccaatttgctttcctcatccccaatggggccttcgcccacagcggcccggtcatcccggtctacaccagcaacagcgggacctcggtgggtcctaacgcagtgtcgccttccagcggctcctcgctcactgcggactccatgtggaggccgtggcggaactga

SEQ ID NO: 186 - DNA, 1863 bp, Rattus norvegicus
gtgcctcaaagccaaggccagcgaggactccccttgggatcacattgacctcaccacaccactaaggtgctgaaccttctgcatcaacaaggcgcaggttaaaccccagtgtccacatggattttcctggtctaggggccctgggaacctcagaacccttgccccagtttgtggattctgccctggtgtcctcgacatcagactcagcgggtttcttttcctctgggcctgagagtttggatacagcatcttcctccacttctccaaatgcagccacggcagcagccacggcactggcctactacagagaagctgaggcctacagacactccccagtctttcaggtgtacccgctgctcaacagtatggagggaatcccagggagctcaccttatgctagctgggcctatagcaagacggcgctctaccctgcctcaactgtatgtcccagtcatgaggatgccccttcccagaccctggaagacccagatgggaagaacaacaatacattcttggaaaccttgaagacggagcggctgagtccagacctcctgaccctggggactgcactgcctacatcactccctgtcaccagcagtgcttatgggggagctgactttcccagtcctttcttctctcccactgggagccctctcagctcagcagcctattcttcccccaagtttcatggaagcctaccattggctccttgtgaggccagagagtgtgtgaactgtggagcaacggctactccactgtggcggagggacaggacaggtcactacctgtgcaatgcttgtggcttgtatcacaagatgaatggtcagaaccggcctctcatccggcccaagaagcgaatgattgtcagcaagcgagcaggcacccaatgcactaactgtcaaacaacaaccacgaccctctggcggaggaatgccagtggagacccggtgtgcaatgcctgcggcctctactacaagctgcaccaggtgaaccgcccactgaccatgaggaaagatggaatccagacgaggaaccgcaaggcatctggaaaagggaaaaagaagcggggctcaagtctggccggagcaggagcggctgaaggaccagctggtggattcatggtggtagctggtggcagcagtagtgggaattgcggagaggtggccccaggcttgacactgggcactgcaggtactgcccatctctaccagggcctgggacctgtggtgctgtcagggcctgtcagccatcttatgtctttccctggacctctgctgggatcgcctacggcctccttccccacaggtcctgtgcctaccaccaccagcactagcgtagtgtctccactcagttcttgaaggtacacaaaatgcctttggccttgtggcagaggagatgctcccctcctcccccacctttattttttggagacaggatcttgtgtagctcaggctgcctgtgaactatgtagctaagggtgaccccaaatttcccattctcctgcctctacctcctgagattaaaggcatatatcaccatgcttgacattttcctttgtttcagttttgtttttgttttgagacagggtttcactatgcagccgaggctggctttgaattccctatgtagtccagactaacctcaaacttgagattctcctgcctcagttcccgagtgctggaatcacaggcatctgctaccactcctgtttctccctcctcttagagccaccagcctttacagcccaaccatctccttgccctgtaccctcaaagattttgtaaaataaaaccaccaaagacctgaacctggagactgtgagctggtatttggctaaataaatgtcagtgtcaagtggtgtcc

SEQ ID NO: 187 - DNA, 1338 bp, Rattus norvegicus
aagctttggaattactgaggttagactaatgcaagtgctgggtaatcgtacttatacacaagtctaaggttctgcaggaaagaaattgtctttggtatctgcatcaggctagtattattaacatttggattttgctttgggatagagcttgtatgaccctagaaccaaacccccctccccaatcaactgagattaaaaagatccatgtaaaaatttccttcatttgcaacccccaacccacccgccccggataaaaagtcacaggcatctacctagcacaaaggttacgaaatacaatgcatagtcgacagtggtgctgcaaaaggaaacaaaactagaaacaagataaagacaaatctgatcattgttctgcatgtttcctcacaaacaggacagccacttccaagcagttctggtaacagaaaagagaaagaaggctcagaagggcccttgggttgagaccccgccccaaaggtgaaagcacccagcagagtagccaatcctgtgccagcatcttcagcttcccactctgtggagtccatggccacaccgtagcagtgcccagctctaaggccctgcgctaagctctggtgctctggtggtgaccctggctgctgtcataaagtctgtggtggtgatgggattttggcttttgttttgaaaaatctgatgttcccatttccttgatgcatgctctgcttacaagtcagtcagcaagggtcaaagctcccgagcgtgcatctgaatgaatccctcaacttagaaaaagacttgctgcccttctgagctggccagaggtgtcgacacctacccttggcatgcctccaagtgccaggatgccacagactggattgaggctgaagacttcccttttctttggtttttttgtttgttttgagtttatacaagcattaagaaatctttggttttggctggaaatggaaaaacaaaacaaagaaaccaccctcccctggcttatagcagcagtataatgacctgacttggctaagctttttcttcccccaactttggggttgggaactgcaagttaagaactacattcaaagaaaatgttgaaagggctggagaagcagcttccagaaagcccgtcggatataagattgtcaaataataattattattacaatattaataataaacttaaatatttggaaattttttggtcatgtcacacaggaaacaagtgaaatgtgtagcttaagtcagtgtaaatgaacctttggtgtcctttctaccaagtcctggcaatgagcagaatcccatggcctcaggggggaacggcgagtcagaagctgatggatagccagcagttagaaa

SEQ ID NO: 188 - DNA, 2825 bp, Rattus norvegicus
cgcggcggcaccggtgggagcggggccctgcacttggagtgcggcgggcaagcggacgggtggcggaggcctctcagcggcggcggcggcgacttaaggcgcaggcgtggtccgttgggtgcgaatccgctgagcccacgagcggcctcttagccctctctcctgcccgtcggaaaccgggagcagggacccgcttagccggcgtcatcatgaccaagaccggtagcaagggcgggaacctccgcgacaagctggacggcaatgagctggacctgagtctcagcgacctgaatgaggtccccgtcaaggagctggctgcacttccaaaggccaccgtgttggatctgtcctgcaataaactgagcactcttccgtcggatttctgtggcctcacgcacctggtaaagctggacctcagcaagaacaagctgcagcagctgcccgcagactttggtcgcctggttaaccttcagcatttggatctcctcaacaacaggctggtcaccctgcctgtcagctttgctcagctcaagaatctgaagtggctggatctgaaggacaatcccttggatcctgtcctggccaaggtggcaggtgattgcttggatgagaagcaatgtaagcagtgtgcaaacaaggtgttacagcacatgaaggccgtgcaggcagatcaggaacgagagcggcagcgccggctggaagtggagcgagaggcagagaagaagcgtgaggccaagcagcaagctaaggaagcaaaggagcgcgagctgaggaagcgggagaaggcggaggagaaggagcgtcggcgaaaggagtatgatgctcagaaagcttccaagcgggagcaagagaagaagcctaagaaggaaacaaatcaggccccaaaatcgaagtctggctctcgccctcgcaagccaccaccccgaaaacacaatcgctcctgggctgtgctgaaggggttgttgctgctgctgctgctatgtgtagcaggagggctggttgtatgccgggtgacagggctgcaacagcagcccctctgcaccagcgtgaacgccatctacgacaatgccgtccagggcctgcgccatcatgagatcctccagtgggtcctccagaccgactcccagcagtgagctcatcctcagcaccgctgcctcccagcctcggagcttggattcctatggaattgggttctgctggacacaacttctttttagcgtcagacctacctgccatcatcaaatggctgctgagtggtacttgagatctcccctttgtaggacttctctgttccttagtcagggttccctggtggaatgaggagaaatggagaggggggaggaagagttacctgcatgcctaaaggaataggcttaggggtggggagagagaaggcataggcttttctagttatgcaaagctgtgtaaggcaaggttcctttctactaaatggtcagctgtcactacatttatacttttgtatgtcacaaaccctttctttcattcctccctgggtaaccaggacggattggagggcagtgtgttactgggactaggggactaggaatacttgggtaaattcagcctaagctgggagggtaaagtaatacatttccttaaagatctcagacagtcaagcattttagcaatgtccaaaatgtctggctatgaacacatgttcactgccattggtccagtgtaacactttgaggcaggaggtgccgtccatgacttacttgcctacagtgttcaagctagtccaaggcacaacccagctttcactccagttttcttcctttcctttatgtcatttggcctcctttataatactcaaggggatgaactcacaccagagttgtcttagctaaagtgaatctttcataatagacggtcttaccacccacaaatagatctcatcagggtcctgggaaactaatcctgtggaattttgcctcagcttaaatggcttccacaaaatggcagcaggctgggctccttgcctcccttttagagcattaaactccctgatggcctggaagcacaggggcagatctctgcagcggcactgtgactgccctactagcacttggtatgatgaaatacctcaaaggcaacctagaaacttgatctcacagaagcaggtgcagagttgcttctggacctgtaacagaagggaaggaatagaacagtgggagccaaagggaaacaaagtcacacggtggcgctgcaagtgatacataagtaaacattagcacaaaccagggcagcagcacccacctccctgctgctaccagaaagcattctccccgcttccctgtctcttcacaacagctgcaggaagggatcggaaacctgtctcggtgcttatttgctaaaactcccaactgcaagctctccctagaggagcaggacctgtcggagttcagacagtgtagccccagtggcccatgtgcttaggtcagccactcaagactgtcctgacacgggaagaaaggcctttgtttttccctcccccagatagttctgccgtgtaggtccacaccttactcagaatcactacacattcctttagtcttcctccaagctccagagccatcggtacaaatgctttattgagacaaaatacatactacatatggtgacatcatgaaaacagaagtcagcctcatagatccctggctggttgaggcagctcagtggctgggcgtagtcaagccaacccgcaggcaagagttcactctgacttcgagatttgatgcttattctttggatttctacaattattaaatccgtgtctgagtggaaaaaaaaaaaaaaaaaaaaaa

SEQ ID NO: 189 - DNA, 1570 bp, Rattus norvegicus
ccctatccacagcagagatggcggcggcggctgtatcccggacgttgttgccggtggccggacggcgcctgtggggatttacgcgaaggcttccgctccgcgccgccgctgctcagccattgtactttggaggggaccgactcagaagtacacaggctgctccacaagttgttctgaatgttcctgagacacaagtcacttgtttggaaaatggactcagggtagcttctgaaaactctgggatctcaacatgcaccgttgggctgtggatcgatgctggcagtcggtatgagaatgaaaagaacaatggcaccgctcactttctggagcacatggctttcaagggcactaaaaagaggtcccagttagaccttgaacttgagattgagaacatgggtgcccatctcaatgcctatacctccagagagcagactgtctactacgccaaagccttctccaaagatttgccaagagctgtagaaattcttgctgacataattcagaacagtacattgggagaggcagagattgaacgtgagcgtggagtcatcctcagagaaatgcaggaagttgagaccaacttgcaagaagttgtctttgattatctgcacgccacagcctatcaaaacaccgcgctcggacggacaattctgggaccaaccgagaacatcaaatctataagccgtaaggacttagtggactacataaccacacattataagggaccaagaatcgtgctggctgctgctggaggtgtttgccataacgaactgctggagttagcgaagtttcattttggtgactctttgtgcgcacacaaaggagatgtaccagctctgcctccctgtaaattcactggaagcgagattcgggtgagggatgacaagatgccactggcgcacctcgcagtggctattgaagcagttggttggacgcacccagacacgatccgtctcatggtcgcaaacacactgataggcaactgggaccgctctttcggaggaggaatgaatttatcgagcaagctggcccagctcacgtgccatggcaatctctgccacagcttccagtccttcaacacctcctacacagacacaggattgtgggggctctatatggtttgtgaacaagccacagttgctgacatgctgcacgctgtacaaaaggaatggatgcgtctgtgcacagctgttagtgagagtgaggtcgcacgcgccaaaaaccttctcaagacaaacatgctgctgcagcttgatgggtcaactccgatctgtgaagacatcggtaggcagatgctatgctacaacaggagaatccccatccctgagcttgaggccaggatcgatgctgtggacgcggagatggttcgagaagtgtgcaccaagtacatttatggcaaaagcccggccattgctgctctcggtcctattgagcgcttaccagattttaaccagatttgtagtaacatgcgctggactcgtgactgatttttgtgatgaattatcctacacatacatatttataaaactgagacctagaagttttgaaagactgctcatcttcaagtgaa

SEQ ID NO: 190 - DNA, 2394 bp, Rattus norvegicus
gcgccacgacgcaggacctctgcagggtggactgagaggacggatggaagaactcgtgggactgcgtgagggctcctctgggaagccagtaactctgcaagagctatgggggccgtgtccacgcatccgccgaggtgtcagaaggggcctagagtggctgaaagagcggttgttccgtgtgggtgaggactggcacttcctggtggctctcggggtgctcatggctctgatcagctatgccatgaactttgccattggacgtgtggtcagagcacacaaatggctataccgggaggttggggacggccacctgctccggtacctctcctggaccgtctaccctgtggctcttctgtccttctcctccggcttctcgcagagcatctcacccttctctggagggtctggactcccagagctgaagaccatgctgtccggtgtggtcctggaggactacctagacatcaagaacttcggggccaaggtggtgggcctctcctgcaccctggcaacaggcagtaccatcttcctaggcaaagtgggccccttcgtgcacctgagcgtgatgatttctgcttatctgggccgagtgcgcgccaagaccattggggaaactgagaacaaggccaaggaaattgaaatgctctcggcggcagcggcagtgggcgtggccacagttttcgcagcccccttcagcggtgtcctgttcagcatcgaggtcatgtcctctcacttctccgtctggaattactggaggggcttctttgccgccacatgcggggccttcatgttccgtctcctaggggtcttcaacagtgaacaggagaccatcacctccatctacaagaccagattccgagtggatgtgccctttgacctgcctgaaatcttcttctttgtggctctggggttcatctgcggggtcctgagctgcgcgtacctgttctgtcagagaacttttctccgctttatcaagaccaatcggtacacctccagactgttggctacaagcaagccgtcctacgcagctctggttgccctggtcctggcctccatcacctatccacctggtgtgggtcgcttcatggcctcccggctgtccatggcagagcatttgcactctctgtttgacaacaactcttgggcactgatgacccgaaattcatccccaccctggcctgcggagccggacccccagaacctgtggttggaatggtgtcacccacggttcaccatctttgggactctggccttcttcctggtcatgaagttctggatgctgattctggctaccacgatccccatgcctgctgggtatttcatgcccatattcatcattggagctgccattgggcgcctcttgggagaggccctgtctgtcgccttcccagagggcattgtggctggcagagaggtcaaccccatcatgcctgggggctatgctctggcaggtgctgctgccttctcgggggcggtgacccacaccatctccacagcactgctggcctttgagctgaccggccagatcgttcatgcactgcctgtgctgatggccgtgctggcggccaatgccatctctcaaaactgtcagccgtctttctacgatggcaccatcatggccaagaaactgccgtacctgccgtggatccgtggccgacagattggctcctaccctgtgactgtggaacacttcatgaactgtaacctcaccacgctggccaaggacacgcccctggaggaggtggtcaaagttgtgacctctacagaagtgtctcaatatcccttggtggagaccagagagtctcagaccctggtgggcattgtggaacggacccacttggtgcaagccctccagacccagccagcttcctgggctccaggccaagagcgctttctccaggacatcttggcaggtggctgccccacacagccagtgaccctgcagctgtccccagagacctccctgtatcaggcacacagcctctttgagcggctgacccttcagtcgctgttcgtgacgtcacggggcaaagctgtgggctctgtgtcctgggcggagctgaagaaagccatttccaccttgatcaacccaccagcccccaagtgagccagcgttggggtcagaacaggaccccagctaagagctgcagaggctgcacagagccccaccccatttccctccctaccccacccctccagcccagcccggctccccagtgcctcaggcagctctacccagctgaacgggactccgtattcatcatggcctacaccgagagcacaacatctctctggtctggaagggacaaatctcaccctggtgcatgtcccttctgggattatctattcacaaccagtagctcctgagaaaataaaagtaaagctggttcccag

SEQ ID NO: 191 - DNA, 1673 bp, Rattus norvegicus
ggcttaaggaaacttgctgcggaggaaagacattggctggacacctctagatctaccttaagacttgagagctaggttgggaccatggggacagcgaaggtgaccccatctctggtgttcgctgttactgttgccacaatcggttctttccagtttggctacaacaccggagtcatcaatgcgcctgagacaatcattaaggactttcttaactacacgttggaagagcggttggaagacctaccaagggaggggctgctgaccacgctctggtcgttatgtgtggccatcttctccgttgggggcatgattggctctttttctgtcggactctttgtcaaccgctttggcagacgcaactccatgcttctagtcaacctgattgccatccttgggggttgccttatgggcttcgccaagatagcggagtcggttgaaatgctgatcctgggccgcctgattattggcatcttctgtggtctgtgcacgggctttgtgccgatgtacattggagaggtgtctcccactgccctacggggtgcatttggcacgctaaaccagctgggcatcgttgttgggatccttgtggctcaggtctttggtttggactttattctgggctctgaggagctgtggcctggactactgggcttaaccatcattccagctatcctacagagcgcagcccttccgttttgccccgagagtccaaggttcttgctcattaacagaaaggaggaagaccaagcaacggagatcctccagcggttgtggggcaccccggatgtgatccaggagatccaggagatgaaagacgagagtatcaggatgtcacaggagaagcaggtcactgtgctggagctcttcaagtctcctagctacttccagccccttctcatctccgttgtcctccagttgtctcagcagttctctgggatcaatgctgtgttctattactcgacgggaatcttccaggatgcgggtgtccaggagcccatctatgccacgattggagcgggtgtggtcaacactatcttcactgtagtctctctgttcctggtggagcgggcaggaaggagaaccctgcacatgataggcctgggaggcatggctgtttgctccgttttcatgacgatttctctgttactgaaggatgaatatgaagccatgagctttgtctgtattgtggctatcttggtctacgtggccttctttgagattggccctggccccattccctggtttattgtggctgaactcttcagccagggcccccgaccagctgccatggctgtggctggctgttctaactggacctccaactttttggtgggaatgttcttcccctcggctgcggcctacttgggagcctacgtttttatcatcttcgctgccttcctcgttttcttcctaatcttcacctccttcaaagtcccagagaccaaaggcaggactttcgaggatattacccgggccttcgaggggcaggcgcactctgggaaaggctctgctggtgtggagttgaacagcatgcagcctgtcaaggagacccctggcaatgcctgagccggacctcctccctcacctccctccactgtggaaagccaacctcccctgaagtggcgagacctcatcaggatgaaccaggactgcttctgagcgctcgtatcaca

SEQ ID NO: 192 - DNA, 4418 bp, Rattus norvegicus
gaggcgactgagttgctggtgcgcgagtcaccaagtcaccaacttttcctgtgctctcggtgtctggccagattcccggagtgtcagcagagcacggggtgactccttcgtccaccggtgctcaagacctcccggtaactttctttcccgcagcccaggagcagatggggaggctcccggtgctgctgctatggctagcctggtggttgtcgcaggcaggcatagcctgcggtgccggctccgtgcgcctggccggtggcctgacgctgggcggactattcccagtgcacgcgcggggagccgcaggacgcgcgtgcggggcgctgaagaaagagcaaggcgtgcaccggctggaagcgatgctctacgcgctggaccgcgtcaacgctgacccggagctgctgcccggcgtgcggctgggcgcgcggctgctcgacacctgctcgcgggacacctacgctttggagcaggctctgagcttcgtgcaggcgctcatccgaggccgcggagacggcgacgaggccagtgtgcgctgccctgggggagttcccccgctgcgctccgcgcctccagagcgcgtggtggcggtggtgggagcctcggctagctccgtgtccatcatggtggccaacgtcttgcgcctgtttgcgataccccagatcagctatgcctccacagccccagagctcagtgactccacacgctatgacttcttctcccgagtggtgcctcctgactcctaccaggcccaggccatggtggacattgtgcgggcactgggatggaattacgtgtctacattggcctctgagggcaactatggcgagagcggggttgaggcctttgtgcagatttcccgtgaggctggaggtgtctgtattgcccagtcaataaagattcccagggagccaaagccgggagagttccacaaagtgatccggaggctcatggagacacccaacgcccgtggcatcatcatctttgccaatgaggatgacatcaggagggtcttggaggcaacacgccaggccaacctgactggccacttcctgtgggttggctcagacagctggggatccaagatctctcccatcttgaacctagaggaagaggctgtgggggccatcactatcttgcccaaaagggcttcaatcgacggatttgaccaatacttcatgactcgttccttggagaacaaccgcagaaacatctggtttgccgagttctgggaagagaattttaactgcaaactaaccagctccggtggccagtcagatgattccacccggaaatgcacaggtgaggaacgcatcggccaggactccgcctatgagcaggaggggaaggtgcagttcgtgatagacgctgtgtacgccattgctcacgctctgcatagcatgcaccaagcgctctgcccaggccacacaggtctgtgcccagccatggagcctactgatggccggacgctgctgcactacatccgagcagtccgcttcaatggtagtgcaggaaccccagtgatgttcaatgagaatggagatgcccccgggcgctatgacatcttccagtaccaggcaaccaacggaagcgccagcagcggcgggtaccaggccgtgggccaatgggcagaggcccttagactggatatggaagttctacggtggtcaggcgacccccacgaagtgcccccttctcagtgcagcctcccctgcgggcccggtgaacggaaaaagatggtgaagggtgtcccctgctgttggcactgtgaggcctgcgacgggtaccgcttccaggtggacgagttcacatgcgaggcctgcccaggggacatgaggcccacccccaaccacactggttgccgtcccacacccgtggtgcgcctgacctggtcctctccatgggcagctctgccccttctcctggctgtcctgggcatcatggctaccaccaccattatggccaccttcatgcgacacaatgacactcccatagtccgcgcctctggccgtgagcttagctacgtgctgctcactggcatcttcctgatctacgccatcaccttcctcatggtagccgagccttgtgcagccatctgtgctgcccgcagactcttgcttggcttgggcaccacgctcagctactcagccctgctcaccaagaccaaccgcatctaccgcatctttgagcaagggaagcgctctgtcacaccaccacccttcatcagccccacttcgcaactagtcatcaccttcggcctcacctccctgcaggtggtgggagtgatagcatggctgggggcccagcctccacacagcgtgattgactacgaggagcagaggacggtggaccccgagcaggccaggggtgtgctcaagtgtgatatgtctgatctgtccctcattggttgcctgggctacagtctcctgctcatggtcacgtgtacagtgtatgccatcaaggcccgaggtgtgcctgagaccttcaatgaggccaagcccatcggcttcaccatgtacaccacctgtattatctggctggcttttgttcccatcttctttggtaccgcccagtcagctgagaagatctacatccaaaccaccacactaactgtgtcactgagcctgagtgcatcagtgtccctcggcatgctctacgtgcccaaaacctacgtcatcctgttccatccagagcagaacgtacagaagcggaagcgcagcctcaagaagacctccacgatggcagccccaccccagaacgagaacgcagaggacgccaagtagcaaggttgagtgtgggtgccacaggttgctccctgccctttctctgcttctcctggcttcaaagtggaagctgtgaaagatccacagagaccatcggaggccaggaatgtgtaaagaccatgcccatggtcttttccgaaggaaaaagctaaaccccgaccacgctggacttgtgctttcctgggcacgccaaccacatcattctgcccctccgacccactgtaagaaatactgcttccaggaatcttcctgaagagagacgaaactgacaccttctgggcaggcattcaaaaccatagtgaagccagggcttggccaggttgggataagatttatcttgatccaacactacaacctaggggctggccagggtgtctgtcagaatgtgtaaaccccaacaagaaatccaggattagagctgggtggggggtgcaatcaccacaataggaaacttagaggtctgaatttggggaaatatttccctgagcagagcctgtatgagggttctgggaactgagtgtgagcctgcagcagagagaggagcagtacagggaactggggcaggcttctgtgaggtcgcttcccttgtggtcttttccccagggtcatccaaaagattggacagtttttctctgctgtgtatgtttccatagattactccaacttgaagaaatgccaacacattacagtgggtaagagatggtaaggtatagctagactttggtcagagtgtccatgaattgtcttgtttctgcacttaagagttgttgttgttgttgttgttgttgttgttgttgttattattattattattattattattattattatcattatctagagtgagggtctcactatgtaactctggctgtcctagaacttactatgtagaccaggttggccatgaactcacagagatctgctggcttctgcctcccaagtgctgggatcaaaggtgtgtgtcactatgcccagcttaaaattttaattactaggatgagcacaaaagctcccttgcatagagtcttggagcgcccacctgaaaggtggtggaggcatgtggagggactcatgggaacaccatgcacgggctttagttttgactattagttttacagagctggtttttagttagggaacttttctttcgtcgttttttgttgttgtttcgttgtttgggtttttttttcatttgtttgttttaatgtatagagctaaatgctttaatttattgtgaattctccagtatttaaggtacagaactaagttttgaaagtatgctagctacacttcaatggacagatgctccaaggtgtaatgagctttgatcttgagatgtaatactttacttagtatcttaaaggcaacaggcttctctctagaacatctctgctgttccgctcttcctcacttgctgtgttcccggtttcccacggtgcaaagcacagctcagcatttactgctgagtgagctctgatgctccgttctgaggcttctgtgctaggtcaaccctcaaagtgtgaaatgtgttctcccgggagagccttgtccacgtgaccgtctgcatggtgtttttctcctctgggatctcttctagagtcggtgagccaaggtctgaataaaggttttcttgcactt

SEQ ID NO: 193 - DNA, 1399 bp, Rattus norvegicus
ctgctttcttggttcctgtggagcaatgctttcgcccgcaatgagcttcctcaaaagcttcccgccccctgggtccgcagatggactccggctgcagcagccagacaccgaagctgtgctgaacgggaaggggctcggcaccggcacgctttacattgcggagagccgcctgtcttggctagatggttctggattaggattctcactggagtaccccaccattagtttacatgcggtatccagggacccaaatgcttatcctcaagaacatctgtatgtcatggtgaatgccagatttggagaagaatcaaaagaacctttctctgatgaagatgaggacgacaatgatgatgttgaacccatttctgagtttagatttgtgcccagtgataagtcagcattggaggcgatgttcacagcaatgtgtgagtgccaggccctgcatccagaccctgaggatgaagactcggatgactatgatggagaagagtatgatgtggaagcacatgagcaaggacagggggacatccctacattttacacctatgaagaaggactatcccatttaacagcagaagggcaagccacgctggagagattagaaggaatgctttctcagtctgtgagcagccagtataatatggcaggcgtccgaacagaagattcagtaagaacttacgaagatggcatggaggtagagaccacaccaactgttgccggacagttcgaggatgcagacgttgaccactgaggatgactcgtgtgacttacaattctgctcataactataggcaagaacttgatgcctcttcactccagaatggagctggtgaaaggctttttttcttctccaaaactcatttctcaagacaaactataatgagacagcaagctgtcaccagcagaaaagactttgacctctattaacaaaggtgaattaactgaacgggtttttgtagtttctcatttacccctaagcttcctgtgtctagttatcttctgagagcctctaattcctgctttgctgtgtgcaatctgtcagctacgaggctgtgtgtcgtgtgcacagtctcacgctggcaaaagtgaggtgggagcttagatgtctctgggacttaggaggactctctgatccctgagataaaaagcaaaggcctctgagggcacagctttagcattctccacggacgcatgggccctctactggggctcaaccacatctcgtcatgacaaatgcttgtgtgctacttctgttcctccgcatttaccatcagctctgttacattctcctagcttaggtccttgactgtcacagagtaaatcatctgaaatgaagtctgcaaagtactctcaatgatattttgtctttgtaatagttaaataaatctgggttttctat

SEQ ID NO: 194 - DNA, 3751 bp, Rattus norvegicus
agaaagagagctacagactccgcgcgctccggaagaccgggtcgtagagctcgagacaactcccgccagcagcaagacacgggagacccaaccaggatgacaaccctccccaggccgcccgctccatggaacaccagctcctgtgctgcgaagtggagaccatccgccgcgcgtaccctgacaccaatctcctcaaccgaccgggtctgcgagccatgcttaagactgaggagacctgcgcgccctccgtttcttacttcaagtgcgtgcagagggagattgtgccatccatgcggaaaatcgtggccacctggatgctagaggtctgcgaggagcagaagtgcgaagaggaggtcttcccgctggccatgaactacctggaccgtttcttgtctctggagcccctgaagaagagccgcctgcagcttctgggggccacctgcatgttcgtggcctctaagatgaaggagaccattcccctgactgccgagaagttgtgcatctacactgacaactctatccgccccgaggagttgctgcaaatggaactgcttctggtgaacaagctcaaatggaacctggccgccatgactccccacgatttcatcgaacacttcctctccaaaatgccagaggcggatgagaacaagcagatcatccgcaaacatgcacagacctttgtggccctctgtgccacagatgtgaagttcatttccaacccaccctccatggtggctgctgggagtgtggtggccgcgatgcagggcctgaacctgggcagccccaacaacttcctctcctgctaccgcacaacgcactttctttccagagtcatcaagtgtgacccggactgcctccgtgcctgccaggaacagattgaagcccttctggagtcaagcctgcgccaggcccagcagaacatcgatcccaaggccaccgaggaggaaggggaagtggaggaagaagctggtctggcttgcacacccaccgacgtccgagatgtggacatctgagggcccaccgggcaggcgggagtcaccaagtagtggcatccgcgaagagaaaggagccagcccgggtgctcctgacgaggtcccccttggggatgtgttgttaccagaaggggaagttttgttctctttgttggttgtttttccttaatctttctcctttctatctgatttaagcaaaagagaaaaaaatacctgaaagctgtcttaaagagagagagagagatagaattcgcatcaccctgagtatagggagacgggggggtgcctacaaaaatagaattctgtaccccagtaatcaactagttttctattaatgtgcttgtctgttctaagaataggattaacacacaggaagtcttgagaaggatttttgattcttttatgtgtttaagaaaaaaaagcttaagaaacattgctttaaaaaaagaaggaaaaaaaatacagcaaaccattgttaaagtagaagggttttaggtagagaaatgtactctgctttggtgaaaaggcacagatttgggaaggtcctcaacctcactcccctgcttgttcagtgcctacagacctgttacctgatgatacctgtgctttatcccaggagtggggcagacctcttaaccttactgatggtcgattcgacctctagcgggctcgtgggtgtggcaacctccagggctcatgttatgggccctctgccccccacaacctgcaggttcacagagcgccagccagcacgcaggggtagggatgaaatagtgacataatatattctatttttggggaaccttcctgttttgggggttcctgtttagagagatgctggtttttggctggtggccctgcagcccactcaacatcaggttgaacccacagcttttcttttgtgtgtggtttgttttgttatgtttttccttctccatgttcccaaaaccattccatttcaaagcacttttggtcagctagctggaggcagtgttgctgggtgtgtgtgtgtgtgtgtgtgtgtgtgtgtgtgtgtgtgtgtgtcggtgggggagggggtctagtggaatggttggggatgtccacacactcaattctgatggctgcacagcaggtgtgtagggctggtagcatgaggtgcttgggaagttgtgttgggtcgagaagagaaagctctgttctcgtaccaccgggatcttcctgcaaagtcggagggatcttttggtgccagctggcgtttggaagtagggaccgtgatggcattacctggacaaggggattcaggacgactcttaagtctttcacacaggaggcttttaaacactaaaatctctaatttatacgtaaggctacagaagagtatttattgggaaggttgcccatgacccgtgtgactcaaagcaatgtgatcttcccttgattcaaacgcacaccttcttccctgctggcgaaggttttaggccattgtctgagagactggtcttttattggccaagtggggtgtcctccaaaaaaaccaaaccacaaagacggagatgtgggtctccttgactttcccaacccaattgcccccattggagagccatccaaacctgaggaaaattaggggaccccaaaagagtcttgagtctggcacattcttgccgccgctcccaagttagcaacagtaggtaatttgcacacctctggctctgtgcctttctgttcaggatgtgttggtgggaggtggagagcgggtggctggagaggggatgtgagagaagaagtatggagggtagggaccacacgggacagaccgcggctcctttcacagcgctgctaccaatgactcccaggatccccggcgttcggaaccagattcacgttgctttgtatctttcatgttgttttcgctgctattggagggtcagttttattttgttgttgttggtttgtttgtttttttttacaatgtcataaactgccatgttcaagttttaatttcctcgtagaagagtgtatttacagatgccctctccgggactttttctatttattgtgattcaattttggattaatgtgattaccgctgtattcccaacaaaaggtgttttccacacacacacacacacacacacacacacacacacacacacacaggttcctgtacacaatacctcatgtatcacctaacaatacataggcctgccaggcgggtggggcggtctgcctccagggaccctgggaccctgctggggatcatcctgtcatgctgggccttcatttgatctgggacatagcatcacagcagtcaggccaactgtgttctgttagttatcaatattgttacttgtagcggcctgttgtgcatgccaccatgctgctggacccggagagatttgttctgagtctctggtgcatcatataatctgttaggttctagtgttctgtcttgttttgtgttactcacagcattgtgctaatgtaaagccagccgcaatgctgtaggccccaggttccctagcaagctgccaaaccaaaagggtcaccaccagcttagctgaggcgtcccaaccaggcaggacccttgagggctgctgtgtccatggtgatggggtgaagttttggccaaagggccaaaggctggtggatccacacagtctgccctgtgacatgaatggctttgaggggctctggctggtggtcaggttggctttgtgtattctggttgacacaccatggcgcttcccagcacagacatgtgaccagcatggtccagg

SEQ ID NO: 195 - DNA, 647 bp, Rattus norvegicus
gcttgggtcaagcttgaacttggttaccgccttctgttttcgctctgccttaaaacaggggcaaggatcctccaccccgaggtaacagaccctgtgggcccgtcgctttcccgcagaacatgagactgcctagaggagtaggggacgcggcagagctgcgcaagagcctgaagccactgctggagaagcgccggcgcgcgcggatcaatgagagcctgagccagctaaagggtctagtattgccgctgctaggagcagagacttcccgctattcgaagttggagaaggcggacatcctggaaatgactgtgcgcttcctacgggagcagcctgcgtcagtatgttccacggaagcacctgggtctttggatagctacctcgagggttaccgagcctgtctggcgcgcctggcccgcgtgctgcccgcctgcagcgtcctggagccggccgtgagcgcgcgcctgctagagcacctgcgacagaggactgtcagtggcggcccgccctcactgaccccagcatccgcttcagctccagcaccctctcctccggtgcctcctccaagcagccttggactttggaggccatggtaggttcctggatgttccacaggatcctgctgctggctgtcaagggacctagctgac

SEQ ID NO: 196 - DNA, 3563 bp, Rattus norvegicus
tctagatccaacaatggaaaatctacatctacaatctcacttggaagagagtcaagaagccccttccttttgcgcacagaagaacaaattacaacaatcacacgatcagaacagaatccatcagtagatgctgccccagtgggacgacagaggaaagaaaagagactgacagacaccaggaaggaacaaggcagagctaggcccaaccaacagggagagcatgaaccctgggaaacagacattcggagtgaggatctcccaagaatcctgtctccgtgccttcattaaatcagggttcaccataggaatgctgtggccagctaggaacaaaagcatatcggcagagatgggaggaagtgggaggaagtgggaggctagagggacgtaaataaaaaaccaacagaaagaacaaaaacatacatttagggagaaactggaaggggaccgacggggacagtggcgaggtaggtgatggacggaggcacggtgtcctggtgtgggaggaattggcgccgttcgacaccaggcgggtccgttctgcagcagcactcagctatctccagcagcagccgccgcccgggccgaccagcagccgccgccacaggccgagggagccagcagtcagcggtgaacccgggccctcaccatgagttcttcgcctgttaatgtcaagaagctgaaggtgtcggagctgaaggaggagctcaagaagcggcgcctctcagacaagggcctcaaggccgatctcatggatcgactccaggccgcgctggacaacgaggcaggaggccgccccgccatggagcccgggaacggcagcctcgacctgggtggcgatgcggccgggcgctcgggagcaggcctagagcaggaggccgcggccggcgccgaagacgatgaggaggaggagggcatttccgctctggacggcgaccagatggagctgggcgaggagaacggggcggcgggggcggctgacgcgggcgcgatggaggaggaggaggcggcgtcggaagacgagaacggcgacgaccagggcttccaggagggggaggacgagctcggcgacgaagaggagggcgcgggcgacgagaacggccacggggagcagcagtcccaaccgccggcggcggcgcagcaggcttctcagcagcgcgggcctggcaaggaggccgcggggaaaagcagcggccccacctcgctcttcgcggtgacggtggcgccgccaggggcgaggcagggccaacagcaggcgggaggagacggcaaaacagaacagaaagctggagataaaaagagaggtgttaaaagaccccgggaagatcatggccgaggatattttgagtacattgaagaaaacaagtacagcagagccaagtctcctcagccacctgttgaagaagaagacgaacacttcgatgacacagtggtttgtcttgatacttataattgtgatctgcattttaaaatatcaagagaccgtctcagtgcttcttcccttactatggagagtttcgcttttctttgggctggaggaagagcttcttatggtgtgtcaaaaggcaaagtctgctttgagatgaaggtaacagagaagattccagtaagacatttatatacaaaagatattgatatacatgaagttcggattggctggtcactaaccacaagtggaatgttgcttggtgaagaagaattttcttatgggtattctctgaaaggaataaaaacctgcaactgtgagacagaagattatggagagaagtttgatgaaaatgatgtgattacgtgctttgctaactttgagactgatgaagttgaactctcttacgcaaagaatggacaagatcttggtgttgcctttaagattagtaaggaagttcttgctgaccggccattattcccccatgttctctgccataactgtgcagttgagtttaattttggtcaaaaggaaaagccatactttccaatacctgaagactgtacttttatccaaaatgtcccattagaggaccgagtcagaggaccaaaaggacctgaagagaagaaggattgtgaagttgtgatgatgattggcttgccaggagctggaaaaactacctgggttactaaacatgcagctgaaaaccctgggaaatataacattcttggaacaaacactattatggacaaaatgatggtggcaggctttaagaagcaaatggcagatactggaaaactgaacacactgttgcagagagccccacagtgtcttggcaagtttattgagattgctgcccgaaagaagcgaaattttattctggatcagacaaatgtgtctgctgctgcccagaggagaaaaatgtgcctgtttgcaggcttccaacgaaaagccgtggtcgtttgcccaaaagacgaagactataagcagaggacacagaagaaagcggaagtagaggggaaagacctaccagagcatgctgtcctcaagatgaaaggaaacttcacccttccagaggttgcagagtgttttgatgaaataacctatgttgaacttcagaaggaggaagcccagaagcttttggagcaatataaagaagaaagcaaaaaggcactgcccccagaaaaaaagcaaaacactggctcaaagaaaagcaataaaaataagagtggcaagaaccagttcaacagaggtggtggccatagaggacgtggaggattcaatatgcgtggtggcaatttcagagggggagctcctgggaatcgtggtggatataataggagaggcaacatgccccagagaggtggtggcggcggaagtggtggaattggctatccatacccgcgtggccctgtctttcctggccgaggtggttactcaaacagaggaaattacaacagaggtggaatgcccaacagagggaactataaccagaacttcagaggacgaggaaataatcgtggctacaaaaatcaatctcagggctacaaccagtggcagcagggtcaattctggggtcagaagccatggagtcagcattatcaccaaggatattattgaatacccaaataaaacgaactgatacatatttctccaaaaccttcacaagaagtcgactgttttctttagtaggctaactttttaaacattccacaagaggaagtgcctgcgggttccttttttagaagctttgtgggttgatttttttttcttttcttttttgtacatttttaattgcagttttaaagtgaatcgtaagagaacctcagcattgtgcacgataagagaatgtgtcagtatttcagggttctacattttatctgtaaaatgtgactttttttttatcacaacaaaagtaaaatgttgctttgtacctggtgtcttttattaagcatttactctcccatttctcacagagaataacagtcgggagtcattgtcacaatgaaatagcaatgtcagcaaccagattcatggaaggactgagggtcctcatgaatggcattaagattctgtactgctcataatacactccatcctctctagatggccgggcaatagtggaggggtaatctctgac

SEQ ID NO: 197 - DNA, 3252 bp, Rattus norvegicus
gacacggtgccgggactcagcggtgtgagccccgcgcataataaaccggacaagtgctgcgaggcccgggctgcctgccaggtcgctgagtcgcgcagggacctgtggggcagttggccgcacaggcaagatggggaaccgggagatggaagaactgatccctctggtgaaccgtctgcaggacgctttctcggctctgggacagagctgtctgctggagctgccacagatcgccgtggtgggcggccagagcgccggcaagagctcagtgctcgagaacttcgtgggcagggactttcttcctcgaggctcgggcattgtgaccagacgacctcttgtactccagcttgtcacctctaaagcagaatatgccgagtttctacattgcaaaggaaaaaaatttacagattttgatgaagttcgccacgagatcgaagcagaaacggaccgagtaacaggaatgaataaaggcatctcctctgtacccattaacctgcgagtctactctccccacgtgttaaacctaacgctaatcgacctacctggaataacgaaagtgcccgtgggagaccagccgccagatattgagtatcagatcagagatatgattatgcagttcatcaccagggagaactgtctgattttggctgtcacaccagccaacaccgatcttgcgaactcagatgccctgaagctagccaaagaagtcgatcctcaaggcctgaggaccattggcgttatcaccaagctggatctcatggatgaagggacggatgccagggatgtactagagaacaagctgctacctctccgcaggggctatgtgggggtggtcaaccgaagccagaaggacatagatggaaagaaggacattaaggcagctatgctggcagaaaggaaattttttctctctcatccagcatatagacacattgctgatcggatggggaccccacacctccagaaggtcctgaatcagcaacttaccaaccatatccgagataccctgcccaacttcaggaacaagctacaggggcagctgctctccatagaacatgaagtagaagccttcaaaaacttcaaaccggaagaccccacaaggaagaccaaagcactgctacagatggtccaacagttcgctgtggactttgagaagagaatcgaagggtcgggggatcaagtagacacgttagagctctctggcggtgctaagatcaatcgcattttccacgagcgctttccttttgagatagtgaagatggagttcaatgagaaagaactgagaagagaaataagctatgcaatcaaaaacatacacgggatcaggacagggttgtttactccagacatggcgtttgaggcaatagtcaaaaaacagatagtaaaactgaaagggccttctttgaagagtgtggacctggtgatgcaggaactgatcaacacggtgaagaagtgcaccaagaggctggccaacttccccagactttgtgaagaaacagaaaggattgttgctaaccacatccgtgagcgagaaggaaagaccaaggaccaggtcctgctactgattgacattcaagtctcttacattaacaccaaccatgaggacttcatcggctttgcaaatgctcagcagagaagcagtcaggttcacaagaaaagcacaattggaaatcagggaaccaatcttccgccttcaaggcaaattgtgattcggaagggctggctgaccgtcagcaacattggcatcatgaaaggaggctcgaagggctactggtttgtcctcacggcagaaagcttgtcctggtataaagacgatgaggagaaagaaaagaagtatatgcttccactggacaacctgaaagtccgggacgtggagaaaggcttcatgtccagcaagcacgtcttcgcactcttcaacacagaacaaaggaatgtctacaaagactatcgttccctggagctggcctgtgattcccaggaggatgtggacagctggaaggcgtctctgctcagagctggcgtctatccagacaagtcttttactgaaaatgatgaaaatggacaagcagaaaacttctccatggacccgcagttggagaggcaagtggagactattcgcaacctcgtagactcctacatgtcgataatcaacaaatgcatccgagacctaattccaaaaacaataatgcaccttatgatcaataatgttaaagacttcatcaactctgaactcctagcacagctctactcctctgaggaccagaacacactaatggaagaatccgtggagcaggctcagcgccgggatgagatgctccggatgtaccaagccctgaaagaagccctcgcgatcattggcgacatcaacacggtcactgtgtccaccccagccccacctccagtagatgactcctggctccagcattccagaaggtcacctcctccaagccccaccacccaaagaaggctgactctaagtgctcccctcccgaggcccgcatctagccgtggaccagctcctgccattccctctccaggcccccactctggggctcccccagtcccattccgtccaggcccattacctccttttcccaacagcagtgactcctacggagcccctccacaggttccatccaggcccacaagggcaccccccagtgttccaagccggaggccacccccatcaccaactcgccccactataatccgtccactagagtcctcactgttagactaaatgaagtgtccggcatggcaattaaatcactaatgattcatgcaaaagcagcattcggttacctttgcagccaaccatgagtagtcgcatgtatggacctccataggcaagtagccagtcctactaacatgttcatcgctcatcttcattgctcatggtgggttagaccttagggtttgactctgaaaacctgctcacctgtagagaggcttaatatgttgtattgaccgaggtagttttatagaacagtcctatactttggtaccacttacctgtccaacagatagcagaaattgctttggaagagtttctaggctgtctacagaggagcttacgaggcttccgaacagacaagagtgtgagcttggaaccacaccgacttctcccacattctgttttgggtggcagaaactctgctgtctgatattaatgccaccactcagttcgcagttgcttatttaggcttctttccctccttatttcataagactgctaaaaaaaaaaaaaaaaaa

SEQ ID NO: 198 - DNA, 2803 bp, Rattus norvegicus
gtcagcgcgagccgctgcagcgattcggggccgcccgtgagcgtgaggctgcaaccctctcctcccgccgacgcatctccaaccgagactccgcccgcctcactccgggcccaggccccgttgcaccccgcccggcaccggacagcaaagccgccgtcgccgcgtcccaaggaacctacagccgccgccagcgccgcccgcctagcaagatgggaaatgaggcgagttaccctttggaaatgtgctcacacttcgatgctgatgagattaaaaggctaggaaagagattcaagaagcttgacttggacaactctggttctttgagcgtggaggagttcatgtctctgcctgagttacaacagaaccctttagtacagcgggtcatagatatattcgacacagacgggaatggagaagtggacttcaaagaattcattgaaggagtctctcagttcagtgtcaaaggcgataaggaacagaagttgaggttcgctttccgtatctacgacatggataaagacggctatatttccaatggagagctcttccaggtgttgaagatgatggtgggcaacaacctgaaagatacgcagttacagcagattgtagacaaaaccataataaacgcagataaggacggggacgggagaatatcctttgaggagttctgtgctgttgtaggtggcctagatatccacaaaaagatggtggtggatgtgtgactctttgaagactctaccacccagcacttttgctttcttctccatctctgaagatctgctcaagacgtccagcaatgctctctgtgtgtgtaaatggaagtatttttctctgtgaagccacattttccaacatgagcctcatgaagccaacgaagtgttattgaactcctaccctctcaataactcagtgtagcactttcaagtttgaggggcagcagcaggaaaagagcatatcagtatggtggagaaagggaaggggtggctctttaatttatttttcttcatcttttataacaagaaagtatctatatatacatatgtaaatatttatatatagatatatgtagctttctatatatttagtaggttggctttaatttaatatacttgattcagaaacaaaatgttagagtacaaaagtgccaagcagaacatataccatccttacttttatttcacacggttttatatgtagatagaggattgtacaattcgcgccaggtattaggccagctagtttcctttctctgtgctttctcctttgagagattgacaaagcatttgttaatgccctattatttaccttaattacacttttgtaacgagtctgtaactttatttatatctctgagtatctttccagggactgtgtcttactgccgagcagcgtttaatccatctctgttggaggtctagttcagtgctgttgccaagagtgggttcttgtgtccatagaactgcataccctgtggctgcttcaggctgatactttttaagtagtcgctgttaattttattaagcgtccctgagaaaaaatgtaattagcagttgtgattttatcaaggtcagaagttttctgaggcagtcatgacttttttaaacgttattatttagtgaagaaaatccaaagcagtcatgcaatggcttaaaacatccttgtttcgttgtacacaaggaaacacttgtcactaaactacaaatcctgggtttattcatgcatttcaaaaaaagttaaccggaaaaaaagtcaactgatacttaaagagcacatatttctgtaaaatcccatttgtggttaaaatgggggagtatcctgctaatctatatgccgttggagagcagattttgcccacatttacatttttaaaatttctttgccagatagaaggcaagatagcacatgatggattttgttgttttgcctgcacaactagcaatggctgatgatgtaatagatttgtgtgacgtaaaagtacgtcatggtctaccacatgacgttatcccttcccttctctgcaaaggtactggaagagagacattctggatagttttatatggcagtcttccctatacagtttttctatataaattggttttgtaatcatgagtggtaaagggcgggtcgaatcgaggtgagggaatattaaatagagtacacctgcctgccaccgctgtcccctcaactgagtgctgcacaccatgggctctgtctgtgagagaaaaatcccggtgcttggtgtctttgcatgacatggagttttgcatgtagatcaatttaaaatgtacctcttgtttacataatttgcataattttaaaagatgatgttgccaaactttggaaatgttaatactcaaaatgaaaatctccactccatgtaactactttctccctctggatcagcacatggcttgcaatcccagccagtggtgtgatctgtcccagtgtcaaccgccatgtgctctgcttcaggagggactgactagtcttttgtgaatttttttgtacataattatttgttacaaatattttagcaaatgctttctatatctcttgcttgtgcatatcttggctggcgttgtggaaaaaaatagtgcaaactatttccttactggggaatgaaggggtttcttttttagtttgtgtgagggaggtggggagggcatggtttatgttgaatgtttaaattttcttctgcatgatacatgtcatgttgtgaaatctttagagaacttcatactgtatgagtaagaaaataaaatatttgaaacttgaaaaaaaaaaaaaaaaaaaaaaaaaaagg

SEQ ID NO: 199 - DNA, 2546 bp, Rattus norvegicus
ctccagggaagcaacagagagaagaaaagaaaggtacatggctacttcccactctcagcctagaagaataaacccttagattgcgggggaactgagccaggcaagccacaggcagccttgagcgcccccttgcctgccctcccctgcgggggccaggatgctgaagaagcagtctgcagggcttgtgctttggggtgctatcatctttgtgggctggaatgccctgctgctcctcttcttctggacacgcccagcacctggcaggctgccctcagacagtgcccttggtgatgaccctgccagcctcacccgtgaggtcatccacctggccgaggacgccgaggcggagttggagcggcagcggggactactgcagcagatcaaggagcattattctctgtggaggcagaggtggagagttcccaccgtggcccctccagcctggccccgtgtgcctgggaccccctcaccagctgtgatccccattctggtcattgcctgtgaccgcagcactgtccggcgctgcctggataagttgttgcactatcggccctctgctgagcatttccccattattgtcagtcaagactgtgggcatgaagagacagcacaggtcattgcttcttatggcaccgctgtcacacacatccggcagccagacctgagtaacattgccgtgcagccagaccaccgtaagttccagggttactacaagattgccaggcactaccgctgggcgctaggccagatcttcaacaagttcaagttcccggctgctgtggtagtggaggatgatctggaagtggcgccggacttcttcgagtacttccaggccacctacccgctgctgaaagcagacccctccctttggtgtgtgtcggcttggaatgataatggtaaggagcagatggtggactccagcaaacctgagctgctctatcgaacagacttttttcctggccttggatggctgctgttggctgatctctgggcagaactagagcccaagtggcccaaggccttctgggacgactggatgcgcagacctgagcagcggaaggggcgggcttgtattcgtccagaaatttcaagaactatgacatttggtcgcaagggtgtgagccatgggcagttctttgaccagcatcttaaattcatcaagctgaaccagcagttcgtgcccttcacccagttggacctgtcgtacctgcagcgggaggcctatgaccgggacttccttgcccaggtctatggtgccccccagctgcaggtggagaaagtgaggaccaatgatcggaaggaactgggggaggtgcgggtacagtacactagcagagacagctttaaggcctttgctaaggccctgggtgtcatggacgacctcaagtctggtgtccccagagctggctaccgtggcattgtcactttccagttccggggtcggcgtgtccacctggcacccccagagacatggaatggctatgatcctagctggaattagtggcacctgcctttccctcctgggtctccttgccgtatgatgagccgaggcagcctgcaggccctgggctataccattctgccagtgtttcctcttggatctatagatcttccctttttgtcctggccttcccccaagtggcattctagtgcacaaatcataagatgagggttatactcctcttgtcaagggagtactgtgtggtatgttcggggcatattgaacaagaaaccactgtgtggtgtggggagggttggacctgttggaccaggcttgtagtgtcctgagttctctccaagggcatctgcggagagcttggccactccagctctcctgaccaggcctctccaccctgatctggctcctgttagtacatgagcccactttatgtaccttccccactttctccaccttccccagggtggggccggattatggaagaaggaatagatttgtggccaactgagactaaccaaagggattcactgtcagagttagattgcatggccgggttgccggggtcactgcctcctggcttctcttcctgccgactttgccagtgctcttcttgtcctgcagtggagcagtgtgttgtgagatggaaagtaggagctaaagcaagacctctcccgtggtggagcagttgtcaggaacaatgacaggcggaaagcctacacttgggcacccctcttcttgcccatggccccccacttctgaaagttagttccctttgcattctttagggggattcagtggcagcctagtgggggacagtgggctccacgcctctttcccctggggttggtacagcctcctcccacagggcttgttcctggtggccatctcagcaaagtcaccagcagctgagaccaggacacctgtggcccttcctaagcattcccacatcttcccaggccgaggggcaggtggcaggctagagagaaagaaatttgtgtgttttgtttgttgcctgatcttagtttcatggaagaaaatggaatctacagaattattttcaaaaataaagtaaaggctgaattgtctg

SEQ ID NO: 200 - DNA, 1253 bp, Rattus norvegicus
cgccgtcctccagcgcgctccgctgcaaccccgcagctgagcccagaggctccggccctgtgcgccctaccgcggccccgccactatggccggcgtgtgggcgccggagcactcggttgaagcgcacagcaaccagtcaagtgctgccgacggctgcggctctgtgtccgtggccttccccatcaccatgatggtcactggcttcgtgggcaacgcgctggccatgttgcttgtgtcgcgcagctatagacgccgggagagcaaacgcaaaaagtctttcctgctgtgcattggctggctggcgctcaccgacttggtggggcagctcctgaccagtccggtggtcatcctcgtgtacctgtcgcagcgacgctgggagcaactcgacccatcggggcgcctgtgcaccttcttcgggctgaccatgacagtgttcggactgtcctcgctcttggtggccagcgccatggccgtggagcgcgccctggctatccgtgcgccgcactggtatgccagccacatgaagactcgcgccacgcgcgcggtactgctgggtgtgtggctgtctgtgctcgccttcgcgctgctgcctgtgctgggcgtgggccgctacagcgtgcagtggcccggcacgtggtgcttcatcagcaccgggccggcgggcaacgagacggactctgcgcgggagccgggcagcgtggcctttgcctccgccttcgcctgtctaggcttgctggctctggtggtgacctttgcctgcaacctggcgaccatcaaagccctggtgtcccgctgccgggccaaagccgccgcctcgcagtccagcgcccagtggggccggatcaccacggagacggctatccagcttatggggatcatgtgtgtactgtccgtctgctggtcgccgctattgataatgatgctgaaaatgatcttcaatcagatgtcagtagagcaatgcaagacgcagatgggaaaggagaaggagtgcaattccttcctaatcgccgttcgcctggcttcgctgaaccagatcttggatccctgggtttatctgctgctaagaaagatccttcttcgaaagttctgccagatgatgaacaacctgaagcggagtttcattgcaatacctgcttccctgagtatgagaatttcttcccccagggaaggataactgaatcattttggattgtatcttctttcggcctcatattttaagttttccttgccattaaacacaccgagacaagctt

SEQ ID NO: 201 - DNA, 3417 bp, Rattus norvegicus
ggggagagatggatagcaagcaagggagggagagagggagtgggaggaggaggaggaggagagggagcccaacgaccatttaaagcgatagcaatccctgccctctccccagtgcttggctgttggagagcgcaagaggcaagccagggaacggggagcgcaagctggtgcgccggccagcggagccacagtgccaggtgccaaagactggctgacgccctgggacacccccaccctctcctgctgcacctcctcggtctcctccaccctctgtgcctacagaagtccctgggcttcccccaaaggagctcacctccagaagcccggacctgggagagcccaccagcataccctccagcgccgccgccgccgctaccgcagcagcatccggagcggcatggtccagctggggaagctgctccgcgtcctgactttgatgaagttcccctgctgcgtgctggaggtgctcctgtgcgtgctggcggcggcggcgcgcggccaggagatgtacgccccgcactcgatccggatcgagggggacgtcacccttggggggttgttcccagtgcacgccaagggtcccagcggagtgccctgcggcgacatcaagagggagaatgggatccacaggctggaagctatgctttatgccctggaccagatcaacagcgatcccaacctgctgcccaatgtaacgttaggcgcgcggatcctggacacttgttccagggacacttatgcgctcgaacagtcgctcactttcgtccaggcgcttatccagaaggacacctccgacgtgcgttgcaccaacggagagcccccggttttcgtcaagccagagaaagtagttggagtgattggggcttcggggagctccgtctccatcatggtagccaacatcttgaggctttttcagatccctcagattagttatgcatccacggctcctgaactcagtgatgaccggcgctatgacttcttctctcgagtggtcccgcctgattccttccaagcccaggcgatggttgacattgtaaaggctttgggctggaattacgtgtctactcttgcatctgaaggaagctatggagagaaaggtgtggagtccttcacacagatttccaaagaggcaggtgggctctgcattgcccagtccgtgagaatcccccaagagcgcaaagacaggaccattgactttgatagaattatcaaacagctcttggacactcccaactccagggccgtcgtgatttttgccaacgatgaggatataaagcagatccttgccgccgccaaaagagctgaccaagtaggccattttctctgggtcgggtcagacagctggggttccaaaatcaacccactgcatcagcacgaagatattgcggaaggagccataacaatccagcctaaaagggcaaccgtggaaggatttgatgcttacttcacatcccggacacttgaaaacaacaggagaaatgtatggtttgccgaatactgggaagaaaacttcaactgcaagttgacaattagtgggtccaaaaaagaagacacagatcgcaaatgcacaggacaggagcgaattggaaaagactccaattatgagcaggaaggtaaagtacagtttgtgattgatgctgtctatgccatggcccatgctcttcatcacatgaacaaggatctgtgtgctgactaccgcggagtgtgcccagagatggagcaagcaggcggcaagaagttgttgaagtatatccgccatgttaacttcaatggtagtgctggaaccccagtaatgtttaacaaaaatggcgatgctccagggcgttatgacatcttccaataccagacaacaaacacaaccaaccctggttatcgtctcattgggcagtggacagatgaacttcagctcaatatagaggacatgcagtggggcaaaggagtccgagagatcccatcctctgtgtgtacattgccatgcaagcctgggcaaaggaagaagacacagaagggaacgccttgctgctggacctgtgagccctgtgatggataccagtatcagtttgatgagatgacctgtcagcattgtccctacgaccagaggcccaatgagaaccgaactggctgtcagaacatcccaatcatcaaactggagtggcactccccctgggctgtcattcctgtcttcctggcaatgttggggatcattgccaccatctttgtcatggcaactttcatccgctacaatgacacacccattgtcagggcatctgggcgggaactcagctatgttttattgacaggcatctttctctgctatatcatcaccttcctaatgattgccaaaccagatgtggcagtgtgttctttccgacgtgtcttcttgggcttgggcatgtgtattagttatgctgcccttttaacaaagaccaatcggatttatcgcatattcgagcagggcaagaaatcggtgacagctcccagactcataagcccaacgtcacaactggcgatcacttccagtttaatatcggtgcagcttctaggtgtcttcatttggtttggggttgacccccccaacattatcatagactacgatgagcataagaccatgaacccagaacaagcaaggggtgttctcaaatgtgacatcacagaccttcaaatcatttgttccctgggatatagcattcttctcatggtcacatgtactgtgtatgccatcaagactcggggcgtaccagagaattttaatgaagccaagcccattgggttcactatgtacacgacgtgtatcgtatggcttgccttcatcccaatattttttggcacagcgcagtcagcagaaaagctctacatacaaactaccacgcttacaatctccatgaacctaagtgcgtcagtggcgctgggaatgctatacatgccgaaagtgtacatcatcattttccaccctgaactcaatgtccagaaacggaagcgaagcttcaaggccgtagtcacagcagccaccatgtcatcaaggctgtcacacaaacccagtgacaggcccaacggtgaggcaaagacagaactctgtgaaaatgtagacccaaacagccctgctgcaaaaaagaagtatgtcagttataataacctggttatctaacctgttccatgccatggagccacagaggaggaagaccttcagttattctgtcacccagcctggcattggactcttggtcctgcccgcttcctatctctggaggagcttctccacccgggagagcaatgttagaggatccacacatcctgaacagctgctttatgagacacctttactttatcttggcttaagaagtcattggcatcagcactgccatcttggctgtaattctggactccctaagcaaagggagagttgagactcaagtccca

SEQ ID NO: 202 - DNA, 2099 bp, Rattus norvegicus
agatcaaagtggtgggactcgcgtcgcggccgcggagactagaaggaggactccggatccggctcggcgctcgccctcgctcgccatggagaagaccgagctgatccagaaggccaagctggccgagcaggccgagcgctacgacgacatggccacctgcatgaaagccgtgacggagcagggcgccgagctgtccaacgaggagcgcaacctgctatctgtggcctacaagaacgtggtcgggggccgcaggtccgcctggagggtcatctcgagcattgagcagaagaccgatacctcggacaagaagttgcagctgatcaaggactatcgggagaaagtggagtctgagctgaggtccatctgcaccacggtcctggaattgttggataagtatttaatagccaatgcaactaatccagagagtaaggtcttctatctgaaaatgaagggagattatttccggtatcttgctgaagtcgcttgtggtgatgatcgaaaacaaacgatagaaaattcccaaggagcctaccaagaggcatttgatataagcaagaaagagatgcaacctacacatccgatccgcctggggctggctcttaacttttctgtattttactatgagatccttaataatcccgagcttgcctgcacactggctaaaacggcttttgatgaagccatcgccgagcttgatacactgaatgaagactcctacaaagacagcaccctcatcatgcagttgcttagagacaacttaacattatggacatcagacagtgcaggagaagaatgtgatgcagctgagggggctgagaactaaaggcatccaggacaccaacctccttcccctcaagaaaacctttttacatctccattccttattccacttggatttcctctagcaaggaagcccattcatgtgtatggggtcaactgtttatagtcttttcacactgcagctttgggaaaactccatcccttggtttgtgttgtctccaccttcctggtgtgcagttactgctgtagaaaagtatcaatagcttcatttcatataaacacgagtaacttccagacacttgtgtagaggactgacagcacatttggtatttaagtaatctgaaccagttctgcaagtgactgtgttttgtattactgtgaagatatggaaatggtagtgcattacaatttaaagtgattgtaataataacgtcttgatttctacattccttttctgaactttcttgggggtttcctttcagaagcaacttttccatgctcttactacaaattcctttttagtaggaatccagaagtgttagattgaatgggaaagcgcttaatgcatccgggcttgggggtcacagattgaaatgtctcctgtgtcacattctggaggttacatctgtctgtgacaacagggcgtttccttatgcattcttcatttgctgctgtttaagttgacaacttccttcccaataaaaattcacttacacctcctgccttcgtagctctggtattcactttaccttgtgacagaagtagcatgttgctgccagaatacaagcattgctttgggcaaattaaaatgcatgtcctttcttaatacactaggaaggagaaataaagtacacaagtccaagtctaaactttagtacttttccatgcagatttgtgcacatgtgagggggtatccagtttgtccagtgattgttctttagagagttggaccactatattgtgtgtttgctaatcattgactgtagtcccaaaaaagccttgtgaaaatgttatgccctatgtaacagcagagtaacataaaataaaactacattttataaaaccatttattatggctttgtaacagttgcatacccatattttaagaacagacaaatttactactttttgaagtttgttgctatttctctttatgtaacatataatggtgatatccatatttctgcattgtggtacacttgtctagggtgcctggcactgtaaaattggactatatttctccagatagcctcatgggttgtcttcctcagatgtaatgataactggttaggtgtcatgtgtaataaagtgaacatttg

SEQ ID NO: 203 - DNA, 792 bp, Rattus norvegicus
cgcgtacccgggaagtccccgtgtgtgtgtaccttgcagcctcccgcttcccggaaccatggagtacctcattggcatccagggtcctgactatgtcctggtcgcttctgatcgggtggccgccagcaatattgtccagatgaaggacgatcatgacaagatgtttaagatgagtgaaaaaatcttactcctatgtgttggagaggctggagacactgtacagtttgcagaatatatccagaaaaacgtgcagctttataaaatgcggaatggatatgaattgtcccccacagcagcagctaatttcacacgccgaaacctggccgactgtcttcggagtcggaccccttatcatgtgaacctcctcctggctggctatgacgagcatgaggggccagcactttactacatggactacctagcagccttggccaaggctccttttgcagctcatggctatggtgccttcctgaccctcagcatccttgaccgatactacacaccaactatctcacgtgagagggcagtggagcttcttaggaagtgtctggaggagctccagaagcgcttcatcttgaatctgcccaccttcagcgttcgggtcattgacaaagatggcatccacaatctggagaacattaccttcactaagcggagttcctaacatcatgttcttccctcccacttaccagggacctttttttgatgggttccttttatttttttctactcttttgacgttcactctcaatagatggttaattcaaaataaagctgaacacagctaaattg

SEQ ID NO: 204 - DNA, 2757 bp, Rattus norvegicus
gccagcgaggagagctaaaactacaagagtggatcatgacccatgaagagcatcatgaagccaaaaccctggggatcggcaaggccatcgccgtgttgacctctggtggagatgcccaaggtatgaatgctacggtcagggctgtggtacgagttggcatcttcaccgggctccgcgtcttctttgtccatgagggttaccaaggcctggtggatggtggagagcacatcagggaggccacctgggagagcgtgtccatgatgctccagctgggaggcacggtgattggaagtgcccgatgcaaggacttccgggagcgagaaggacgactccgagctgcccacaacctggtgaagcgggggatcaccaatctgtgtgtcatcggaggcgatggcagcctcactggggctgacacttttcgttcagagtggagtgacttattgaatgacctccagaaagatgggaagatcacagccgaggagcgtacaaagtccagctacctgaacatcgttttcctggttggctcaatcgacaatgacttctgtggcactgatatgaccattggtactgactctgccctgcaccgcattgtagagatcgtggacgccatcaccaccaccgctcagagccaccagaggacatttgtgttagaagtgatgggccgccactgtggatacctggcccttgtcacctctctgtcgtgtggggccgactgggttttcattcccgagtgtccgccagatgacgactgggaagaacacctttgtcgccgtctcagtgagacaagaacccgtggttctcgtctcaacatcatcattgttgctgagggtgcaatcgacaaaaacgggaagccaatcacctcagaagacatcaagaacctggtggtaaagcgtcttggatatgataccagggtcactgttctgggacatgtacagaggggtgggacaccatcagcctttgaccggatcctgggcagcaggatgggtgtggaagcagtgatggcacttttggaggggaccccagacaccccagcctgtgtggtgagcctctctggtaatacggctgtgcgcctgcccctcatggagtgtgtccaggtgaccaaagacgtgaccaaggctatggatgagaagagatttgatgaagccattaagctgagaggccggagcttcatgaacaactgggaggtatacaagcttctagctcatgtcagacccccagtctctaagggcgggttgcacacggtggctgtgatgaacgtgggggccccagctgctggaatgaatgctgcagttcgctctactgtgaggattggccttatccaaggcaaccgagtgctggtcgtgcatgatggctttgagggtctggccaaaggtcagattgaggaagctggctggagctatgttggaggctggactggtcaaggtggttccaaacttggtactaaaaggactctacccaagaagaacctggaacagatcagtgccaacataaccaagtataacatccagggcctggttatcattgggggctttgaggcttacacagggggcttggagctgatggagggcaggaagcagtttgatgagctctgcatcccatttgtggtcattcccgccacggtttccaataatgtcccagggtcagacttcagcatcggggctgacacagcactgaacaccatctgcacgacctgtgaccgaatcaagcagtctgcagcaggcaccaagcggcgagtgtttatcatcgagacgatgggtggttactgtggctatctggccaccatggcaggactggcggctggggctgatgctgcctacatttttgaggagcccttcaccatccgagatctccaggttaatgttgaacatctggtgcagaagatgaaaacaactgtgaagagaggcctggtgctgaggaatgagaagtgcaacgagaactacactactgatttcattttcaacctgtactctgaggaggggaagggcatcttcgacagcaggaagaacgtgcttggccacatgcagcagggtggaaacccaactccctttgacaggaattttgccaccaagatgggtgctaaggctacgaattggatgtctgggaaaatcaaagagagttaccgtaatggacggatctttgccaacactcccgactcaggttgtgttctggggatgcgtaagagggccctggtctttcagccagtgactgagctgaaggaccagacagattttgagcaccgaatccccaaagaacagtggtggctgaagctgaggccaatcctcaaaatcctggccaagtacgagattgatctggacacctctgaccacgcccacctggagcacatttccaggaagcggtctggagaagctgctgtctagaccactttggagtgaggggaaaatcacctgatcatggtcagctcacaccctggtagacctcagcccatggcttctcagtgttgtagcccagcccctacccttctaggtttccctgtactctgtacctgcaaccaggatcactgtggccaggtgttgggggaggggtggtgagtgcctctcctaggtagctgtccttccttgcaccctggcttcatctgtcacacaggctggatgtctctagtgctactgctagatttcagcttctcaagagtaaaagtgagctttatttatttctttgtgataacaaagagtcctaggtcctttccttgtaccacagtgaagtgtaactacactaataaaagccagctggccactgtga

SEQ ID NO: 205 - DNA, 4432 bp, Rattus norvegicus
ccggaggacgaccccgcgcaggacagtgaccccgaagagctgcccctgatcaggcttgagtttgaaaaaattgaagaacctgaatttattgcattatgtcagaagttaaaggtgcccgatcatgtcagagagagagcttggctaacgtgggagaaagtttcatctgtggatggaatcctggaaggatatattcagaagaagaaggaactctggggcatctgcatcttcattgcagcagttgacctggatgagatgccattcacttttactgagcttcagaaaagcatagaaaccagtgtctataaattctttgacttattaaaagaaattgataccagtaccaaagttgataatgctgtgtcaaggctattgaagaagtacaatgtgttatgtgcactctacagcaaattagaacggacatgtggacttatatatttgacacagcccagcagtgggttatctactgaaataaattctatgttggtgctaaaagtttcttggatcacctttttactagctaaaggagaagtagtacagatggaagatgatctggtgatctcatttcagttaatgttgtgtgtacttgactattttatcaagctctcgcctcctgcgctgctcagagagccgtacaaaacagctgcaacacccattaatggttcacctcggacacccagaagaggtcagaacaggagtgctcggatagcaaaacaactagaaagtgatacaagaactattgaagttctctgtaaggagcacgagtgtaatgtagatgaggtgaaaaatgtttatttcaaaaattttatcccttttataagttcacttggaattgtatcatctaatggacttccagagcttgaaagtctttctaaacgctacgaagaagtttatcttaaaagcaaagatttagatgcaagactatttttggatcatgacaaaacacttcagactgatactatagacagttttgaaacagagagaactccacgaaaaagcaaccctgatgaagaggcaaacatggttactccacacactccagttaggactgttatgaatactattcaacagttaatggtgattttaaattctgcaagtgatcagccatcagaaaatctgatttcctacttcagtaattgcacagtgaatccaaaagaaaatatcctaaaaagagtaaaggatgttggacacatctttaaagagaagtttgctagcgctgtggggcagggatgtattgacattggagcacagcgatataaacttggggttcgattgtattatcgtgtgatggaatcgatgcttaaatcagaagaagaacgtttgtccattcagaattttagcaaactcctaaatgacaacatctttcatatgtctttattggcctgtgctcttgaagttgtaatggctacatatagcaggagtatgttacagaatcttgattctggaacagatttgtccttcccgtggattctgaatgtacttaatttaaaagcctttgatttttacaaagtgattgaaagttttatcaaagtggaagccaacttgacaagagaaatgataaaacatttagaaagatgtgagcatcgaatcatggaatcccttgcatggctttctgattcacctttgtttgatctcataaagcagtccaaggatggggaaggacctgatcaccttgagtctgcttgttctctcagcctccctctccagagtaaccacactgcagcagatatgtatctttctcctataagatctccaaagaaaagaacttctactacacgtgtaaattctgcggcaaatacagagacgcaagcagcctcagccttccatactcagaagccattgaaatctacctccctttccctgttttacaaaaaagtgtaccgtctagcatatctccgactaaatacactgtgtgcgcgccttctgtctgaccacccagagccagaacacatcatctggactctgtttcagcatacattggaaaatgagtatgagctcatgaaagaccgacatttggaccagattatgatgtgttctatgtatggcatctgcaaggtgaaaaacattgaccttaaattcaaaatcatcgtaactgcgtataaggatcttcctcacgctgcccaggagacctttaaacgtgttttgatcagagaagaggagtttgattccattatagtgttctacaactcagttttcatgcagagactaaaaacaaatattttacagtatgcctccaccaggcctcctaccttgtcaccaatacctcacattcctcgaagcccttacaagttctcgagttcacccttgcggattcctggaggtaacatctatatgtcacccctaaagagtccttataaaatttcagaaggtctgccaacacccacaaaaatgactccaagatcaagaatcttggtctcaatcggtgaatcatttgggacatccgagaagttccagaaaataaaccagatggtgtgtaacagtgacagagtgctcaaaagaagtgctgaaggcggcaatccccccaaacccctgaagaagctgcgctttgacatcgaaggatccgatgaagcagacgggagtaaacatctcccagcggagtccaaattccaacagaaactggcagaaatgacttctactcgaacacgaatgcaaaagcagaaactgaatgatagcatggaaatctcaaacaaggaggaaaagtgatgatctcaggaccctaacactgtagaccctcgggacacctgactcgtgtctcatggatgtgactatagttcccaggttctgctcatgttatagatataaaatgtgcaggtacagctgaatatttatgtgggtgatttgtaagccacttcaatgttgtaatcaatggtatagaattgacagtacacaggattgagaatcttgtgcagatcatgccatttaaaatatgaaagcagattgttggcatttccaacaggagcctgctgccctcagaagtgaggctgcctctggagggagtcctagcaactcccttacatctggctgactactttgcctttccttgtggcacatgtgtgatgtttgctcttggttttattaatttatatgtattttttaatttaacgtgaatatccttagaaaatgtgtcttgtcttccaaatgcaagttgattgattgtccacattcaaccaaattatcttgaatcctctactgaaacagattgttacaaactggggaaaagtactaatttgtacacattggacttgttttaatactagaatctaatgtgccatatgtttgtttcacacattttacctttgaaatagaagtaaaaaaagtataaacatatgatactgtcttactactgacacagatttcatacctcagaccctctaagaaccaattcttttattcatccaactcatactttaaactgaagactattgataatactccaggtttgttttttcttttaatctttcagatcactgaatctttaagtacccatgtagtacttgaaaatcaagtctggccacaactgtacttcagaggaccctagtacagtacaacccaagtgcactttctaatgtctctgggtcctgaggaatcaagatacaaattaactatgttctgtaagcagaccgttaactataggagccttcggtttaactatgttctgtaagcagaccgttaactataggagccttcggttttccctcatacaagtgtctaaccacatctcaacagttcactctgctcttctgcatccagggctgatgtgttccctctggaatggtacatgtcttccagggtcttttgaactggcaggtatctatttttttaagccaatctggtctaataacactggcttcttcaaagccacagcatttctaatccagctgtgccgaagcttcagactaaaacagctgcattgaaagaagaggcactcccttcaccccccccccccacctaaaggtgtttacattatcttgtgggattaacttatttagagatgctataatttaaaataggcggtatttaaggtagcgtcagctagcatttaagaaaatcattttttctaaactccatactttttgaaaagaaatctggtcttgttagaaaacaaatttctactttgtcctcaatttagtttcagttttactaggttgatagttatctcgatgacaaaggccgtagacagctccccccatttcttcattgagttttgcatggccatcacacaggttagttgggtttaggtcaagggctgaccatacttctaggtcttttgctagtaagttcaagttagaattagtgacagaatcataggaattttcagagatcctctattaagatttcttaaaactgcagaccctgcttttgtttttgtactggttaaaactatacattcagattgctatgttcctattttctataatagtttgtctattttaca

SEQ ID NO: 206 - DNA, 2313 bp, Rattus norvegicus
ggcacgctgacagagaaaccatggaggaaatagtggggcttcgagagggctcgcccaggaagccagtgcctctgcaagaactctggaggccgtgcccacgaatccgcagaaacatccaggggagcctagagtggctgaaagagcggctgttccgtgtgggtgaggactggtacttcctggtggctctcggggtgctcatggctctgatcagctatgccatgaactttgctattggacgtgtggtcagagcgcataagtggctgtacagggagattggggacggccacctgctccggtacctctcttggaccgtgtaccccgtggctcttctgtccttctcctccggcttctcacagagcatcacaccatcctctggagggtctgggatccccgaggtgaaaaccatcttgacaggtgtgatcctggaggactacctagacattaagaacttcggggccaaggtggtgggcctctcctgcaccctggcaacaggcagtaccatcttcctgggaaaactgggcccctttgtgcacctgagcgtgatgatcgctgcttacctgggccgcgtgcgcaccaagaccgtcggggaacctgagaacaagaccaaagaaatggaattgttggctgcaggagcagcagtgggtgtggccacggtcttcgccgccccaatcagtggtgttctgttcagcatcgaggtcatgtcctctcacttctccgtctgggattactggaggggcttcttcgctgccacctgcggggccttcatgtttcacctcctggcggtcttcaacagtgaacaggagaccatcacctccatttacaagaccagcttcccagtggacataccctttgacttaccagagatcttcttttttgtggccttgggggccatctgtggcatcctgagttgcgggtacaactactgccagcggacttccttatttttcctcaagtccaatgggttcacctccaaactgctggctaccagcaagcccttgtactcagctctggctgctgtggtcctggcctccatcacctatccacctggtgtgggtcgcttcatggcttcccggctgtctatgtcagagtacttggagacactgtttgacaacaactcttgggcactgatgaccaagaactcgtccccaccctggtcagcggagcctgatccccagaacctgtggttggaatggtgtcatccacagatgactgtctttgggacactagtcttcttcctggtcatgaagttctggatgctgattttggccaccaccatccccatccccgcaggatactttttgcccatctttgtctacggagctgccatcgggcgcctctttggggaggttctatctttggccttcccagagggcattgtggctggaggcaaggtcagtcccatcatgcccggggcctatgctctggcaggtgctgctgccttctcaggggcggtgacccacaccctctccacagcattgctggcctttgaggtatccggccagatcgttcatgcactgcctgtgctgatggccgtgctggcggccaatgccatctgtcagagctaccagccctctttctacgacggcaccatcattgtcaagaaactgccgtacctgccgtggatccgtggtcgtaagattggttcccaccttgtgactgtgggtcacttcatgaactgtaccctcaccacgctggccaaggacatgcccctggaggaagtgatcaaagttgtgatctccacggatgtgactcagtaccccctggtggagacgacagagtctcaggtcctggtgggcattgtcaaaaggacccacttggtgcagtccctccataccgattcagcttcctgggctccaggccagcagccctgtctccaggatatcttggctaacggctgccccacccagccagtgacacttcagctgtccacggagacctccctgcatgagacgcacaacctctttgagctgctgaaccttcagctgctgttcgtgacgtcacgaggcagagctgtgggctctgtgtcctgggtggagctgaagaaagcaatttcaaccctgaccaatccgcccgctcccaagtgagtcagcctgggagtcggcagcctggcgcccagtcgctctcagctgctgcagggcatctccactttgcagaggagaggactccacattcacctctccccaccctgaaggagctggttgtaaatgaagacaccaatgcgttctgtcacatcgggacccttggtccttctagggttgtctgctgctaaccaagacttctgagaaaaataaaactgatttctggaaaaaaaaa

SEQ ID NO: 207 - DNA, 1731 bp, Rattus norvegicus
gtcgacagtctgggaggaatcgcccatcgagggaatagatgaaccacaccagagaacatggtagaagcggcccagcagagcaacgtgggctggggtgtacttcagtcggcagagtgctttgatctccagtagtggcccatgccatccagaggtggggagagagcttggggagcagactgtttggaaatggatggccctgtcttctttccatgtaactttccaactcccagttccattctccaccagcaacaacctcatgccatttgaggtgctacttcaatatcgctggcgtctactcatctatgtgaacttaagagtctggtgtcaggcgtgagctgaggtagaggtgggctcttctcagcctctataaaccaattacaccacttgagccaagcagtacacatgcactttctcctccgcctatcagcctagctcctgacaaggtttctctccagccttttactttcctggcttcaagaaaggcggatatataccagggtggggagttgcatttcagagtgagacggttctgtcttcacctaccacttgttggcgatgtgaccttgggcaaagctcattaacagcacagtgcctagttccctaatttgtaaaacatatgctataggtgtgacgattacgaagggctgacttttgtaatggctttgcttcagggatctgcagactcgttgagccacaattaggatgagaatcaaggtgcttcagacttgtgacaggcactggcggcccctcacatgatcctcagataccagattgtggcgtgtgctgctaggatcacttgtctttccagtctcccaacatctcttgggtccgtgatacgcgccccccaccccaagcccagcctgacgcggcggtggctcatgcgccctggagtcccgggctctagccacggaacacgtcccaactctggcgcccggctccgcccctagcctcgggcgcgtctctcccgccgcctgcttgggtgctggagcagccgcgcccgcggctctgggagctgattggctgtggactgcgggacgggcagccggagagcgcacacaccctcttcccgcagccaatgagcgcgcccacgtcactgtcttgggcggcccaaagagccggcagcccctcaataagccacattgttgcaccaactccagtgctagagtctcaggacaccacaggctacacggagttatcccgcttaggagacccgaaggcaggagcatcactccagtgactctgataaggtgcgatcgcccgagaggaacagaactgtcatttttgcgaagttgagccttacggatcccgtgggcgaagttagcgacgggacgctgagcaactagaccggtcggcaggagtgagacttaggtgccttctagtagttgtgacttaaaaaaaaaaaaaaaaaggaaaagaaaaaaggaggaaaacctgtttctggaaacgcgaggccctcagctggtgagccatcgtggttaagcttctttgtgtggctcctggagtctccgatcccagccggacacccgggcctggtttcaaagcggtcgaactgctctgcccgctccaccggtagcgctcgaacctcggtttctctactcgaccccgactcgccgcagcaggatgatcgcctcgcatatgatcgcctgcttattcacggagctcaaccaaaaccaagtgcagaaggtaagtcggcacgggcgggagctgctggctcgcttcgaccaagttgcg

SEQ ID NO: 208 - DNA, 1835 bp, Rattus norvegicus
ggtaggctcagtgcctaaaagccacagagccccatcaggcggggagcagggtaaagtgcagaagtcggagcccagggctgtgtagaccgccggcactatgctgtacctaccgtgcctgttgctgtgggcattcccacagttctggggacaatccgaagtccagcagaattacaccttcggctgcctgcagatctcttccttcgccaaccgaagctggtcccgcacagacagtgtggtctggctgggggatctgcagacacaccgttggagtaatgactcagacaccatcagcttcacaaagccgtggtcccagggcaaattcagtaaccagcagtgggagaagttgcagcatatgtttcaagtgtatcgaaccagctttaccagggacatcaaggaaatagtcaaaatgatgtcacctaaagaagactatcctatcgaggtccaactgtctgctggctgtgaaatgtaccctgggaatgcttcagaaagctttttacacgtagcatttcaaggagaatatgtcgtgagattccatggaacatcctggcagaaggtcccagaggccccatcttggttagatttgcccatcaaaatgctcaacgctgatgaaggaacgagagaaacagtgcagatactcctgaacgacacctgcccccagtttgtccgtggcctcctagaagcagggaagccagacctagaaaagcaagagaagccagtggcctggttatcccgtggccccaaccctgcccatggccatctgcagctggtatgtcatgtctctggcttccacccaaagcctgtgtgggtgatgtggatgcggggtgaccaggagcaagggggtactcacagaggtgacatcctgccaaatgcggatgagacatggtatcttcaagcaaccctggatgtggaggctggagacgaggctggcctggcctgcagggtgaagcacagcagtctagaggggcaggacatcatcctctactggggtggcagacaagtatccccggtgttgatcttcttgatagtaggcgtactggttctagtggtgtgtgctgtggcctactatatcatcaggaaaaggagacgctcctatcaagacatcatgtgagatttttacccctgcctctcctgaagttcagaccttccaggttctaggacttcagtccttgtctgctcagaaactgaggataaaaaagaggaatcctgaagaaatgaagagcaaccagtacacccttttaatattaattataagaaatcaattatttaaatgatttttataagcttgggtagttcagaacaaacacaactgcacatgtgtgtacctgccagaaacaagctgtgagcagtgtctcgtgggatttgtactgaactagacagcacgcttcctgcccaaacagacactttgggggttgttggcaagtgtaaagtccaacaccaacacgactgtactctgtatttttcaagataacgagaaaaatggatttgtgtgtgtgtgtgtgacatatagctttggggtttgttggcaagtataaagtccaacaccaacacgactgtactctgtatttttcaagataactagaaaaatagattttgtgtgtgtgtgtgtgtgatacaagtattttaaaaagtaaactcaaatatttacaaatgattactaccttaaatacaaagctgctgactgatgattaccccaaaggcttcttccagtgtgtggtctttttacaatgtttgttctaattgtcataatggccactttagggcacagtctccattgaaaatgtgcattaatgactgaaaggtggtttctctttaaaataaaattaggatgtacgatg

SEQ ID NO: 209 - DNA, 3442 bp, Rattus norvegicus
agggaacctttcacagcagccaatacctgcagggcaacaaagaatcaaatgagagcgagacaagctgggaatgaagtcctggttgccagatgggagcttgaaaacacagtaagatgagtcaaaaagtggccaaggagggccccaggctctccaagaaccagaagttctcagagcacttcagcatccactgctgcccacccttcaccttcctcaactccaagcgtgagatcgtggaccgcaagtacagcatctgcaagagcggttgcttttaccagaagaaggaggaggactggatctgctgtgcctgccagaagaccagattgagaaggaggagcaggtcaaccccaagaaaaaagtgaccgagaagggacttctcgtgaatggacagcctctgcttgtggatttactgcttcaccgcaacccatctgccctcagacttatctggcctcgagtatgacgcaggggtggacacctgctgatgtaacaactacagatgccctcagtccccatggtgtgggagccttagggcagcctgcctggaggtgaggagggagctcttcatgccttactctagccacagagtcctggaaggacccctcgggctccagagctcagggaatgggtcttttggtttcatctggagcccttttctctctggcaggtgcacagttcctcagggtctttggcaaaggtgattacagagtcaatccacacacattcctcctccttccaattcccctctctccctgggtcaggttgacaacctggctctttttcctttccttcctaattctctgcctggcctctcttgatcacgtgacatctgtctcccattgaccttcttaatcaggagtggtcagagccaacgtccacactggtgaaggctcaggttatttttggagtaagatacagagttgctgtatgatccttaaatgcagcaatgttctcataagaatgggatcccgttaaatcttcacgtcaactgtaggtaacttgtgtcagaaacagagaaaagggggcatcttcctccctccccctctgcaggcccagtctccagcgttacacagggctttgtgagcaccagctcctgccccagtctggggataacaaccctctaaacactgactttgacttgtccccagtgcagttggcactcagcctcacagactctcagtgcagctctgactgctctcaattatataatttaggaaggtcatgtggcttcagccctgtcccccattccccatcacctcccttgaggcatcctggacaagtcccatgtgcacttgtataggtctagaaagaatgcttggagagtttctgtctccaggtcaaaattcctcaaattcctgggaagggcagaggcttgatgctccagtgttttccgtggctgaccctccacatctgggtctgtggtaagggagaagtcaagaaaaaggggaaaggaacttgactttctataaaggaaggtagtgtgtgtgtgtgtgtgtgtgtgtgtgtgtgtgtgtgtgtgtgtgtgtgtacgtgtgcacatgtgtgtgttagagagctagcaatccaagagtccttcccagactaggaggccaatccatggtatgaaggagtttgtgctcaactgtctatgtggagcagggttgggctgagtttctgtctccttgctctagtttgcctccacgatctgtagctcagactcttgggaaagaatgagcttcggtatggacacttgttctagaccataggagccaaccctcccccatggcacttgcttgtacctcatctgcactcttgctgtgaggacagagattgggccagatgtaaccgccttgtactgccttgtactcgtgtggactggcgtgtgggtgtcggcgttgggattagcttggggagatatttgccagctctcggttttcttgcccaagtgcagatgctagagagcccctccaagtcccaacttaattcttgcctccctgaagacctcaaccgtagaaggtcatcatgaaaaggccaccacttcagagtcctggcctaaactcagagtccacatgccttcccagcaggggccacagaggtgatccacttgggcctctttccccactcagcccagatgggtgggggtggagggtggagggtggaaggagaggagttggagaaaatccatgtctattcaggctccgtctgggtctgctgcacaacaacttcagcttgtttgagcccaaacttacataagttataatcacaaagctggaactagagaaagagagaaggacacacacacacacacacacacacacacacacacatacacacacactcatatatacacatacacacatatacacatatatacacatacacacgcatacacacatacacacatatacacacatacataacacacatacacatgcatacacacactcatatatacacatacacacatatacacatatatatacgcatacacacatacacacatatacacacatacataacacacatacacatgcatacacacacacacacacacacacacacacacacacacacacacaccctcgtcactcctcatccctcctaacattttctccttaggaggctagtagaagggaaggaagccgtttctatttacaaggaagtccggctcacggcccgggagatgactgccttgcaggcatgggggatagagttcggatccccgtgacccacgtgaaggctgggtaggcctggcagtggacctctaaatccaaactcagaaagtggagacaggagatgccagagcaagtcaagaggccatatccatgaactctgggactgatggagaaacccttccttcctccagtgaatatgattagaagacataggctgactcccagtgtcaaactcagggactccatgcacacacacccctgcatgctcctgcacatacacttgcaaacatgagcacacacacttcatacatccacatggaaatgggggtaagagaaacgagagagtacctggctcatggttcctctaggatgggcccaccctgcccaggacttagaagccctttccacacctagcaggaccacacgatttcttctgcctgttctctctcttgtacgtgtgaacaaacgggatgtgtcatccaccatggggctgtgtgcgcactcctagggcctcttgtgctctgacctccctgtcctacatggatgccctcggctcaaatatcaccccagagattcttccacggtcaccgactccgtcattctagtttgtcttcaggaatcatcactcacttgtttaattattgtttaattctcgctccaatgctttgcttaatgtaaatcccatggctgcccctttgatttctcctgtcttcccttgtctggcactaacaagacgtcaataaattcttgccgactgaaaaaaaaaaaaaaaaaaaaaaaaaaaaaaaaaaaaa

SEQ ID NO: 210 - DNA, 2096 bp, Rattus norvegicus
gctcgtccaccctgcaacccccatgggctaccgccccccgcctcctcggctgccacccaagacaaggcagggataagcacagtgtaggatcacgtggccactatgtctggggactacgaagatgacctctgtcggcgggccctcatcctggtttcagacctctgtgcacggatccgagatgctgataccaatgacaggtgtcaagagttcaacgaactgcgaatcagaggatatccccggggtccggatgcagacatttccgtgagcctgctgtcagtcatcgtgacgttctgtggcatcgtcctcttgggtgtctctctcttcgtgtcctggaagttgtgctgggtgccctggagggacaaagggggctcagcagtgggtggtggccccctgcgcaaagacttagcccctggggttgggctggcaggcctggtaggaggtggtgggcaccatctgggagccagcctaggtggccatcccctgctgggtggtccgcaccatcatgcacacccagcccaccatccaccatttgctgaactgctggaaccaggtggccttgggggctctgagcctccagaaccttcctacctggacatggactcatatccagaggctgctgtggcctctgtggtagctgctggggtcaaaccaagccagacatcccctgagctgccttctgagggtggaacaggctctgggctgctcctgctgcctcctagtggtgggggcttgcccagtgcccagtctcatcagcaggtcacaagtctagcacccaccaccaggtacccagccctgcctcggcccctcacccagcagaccctgaccacccaagcagacccaagcagtgaggagcgaccacctgcactgcccttacccctgccaggcggagaggagaaagccaagctcatcggtcagatcaagccagagctataccagggcactggacctggtggccggcgaacgggcgggggctctggggaggcaggggcaccctgtggccgcatcagttttgcccttcggtacctctatggctctgaccagctcgtggtgcggatccttcaggccctggatctcccagcaaaggactccaatgggttctcagacccctacgtcaagatctacctgttgcctgatcgcaaaaagaagttccagaccaaggtgcacaggaagacgctgaaccctatcttcaacgagacgtttcagttttcggtacccttggccgagctggcgcagcgcaagctgcacttcagtgtctatgacttcgacagattctcgaggcacgatctcatcggccaggtggttttggacaacctgctggagcttgctgaacagccccctgaccgtccactctggagggacatcctggagggtggctcggaaaaggcagatcttggggagctcaacttctcactctgctacctccccacggccgggctcctcaccgtgaccatcatcaaagcctctaacctcaaagcaatggacctcactggtttctcagacccctacgtgaaggcctctctgatcagcgaggggcggcgtctgaagaaacggaagacctccattaagaagaacacgctgaaccccacatacaacgaggccctggtgttcgacgtggctccggagagcgtggagaacgtgggtctcagtatcgcagtggtagactatgactgcatcggccacaatgaagtgatcggggtgtgccgcgtgggcccagaggccgctgacccacatggcagagaacactgggcagagatgctggctaaccctcgcaagcctgtggagcactggcaccagctagtggaggagaagactctaagcagctttaccaagggcggcaaaggattgtcagagaaagagaattcagagtgagggtctggtctaggcctgggattggaccaggcgccctcaggacccatcccttcctgcccggactgtgaactcatctcgaagccataatgtccgagctgctggtgcggggcggcctggacctgttcctccttatcctggaggcgtgaggctaggaggcagcaggcccagctccctgtttcagggtgggaggttctcggcctccattgtctgtcttcttatccccagag

SEQ ID NO: 211 - DNA, 2250 bp, Rattus norvegicus
caagggctgagctctgcttgcgttccatcccgagctagggctgccgtgctcacccgggcccccaggtcctccgctccgagtgtccggcccgctttcgtcagggttcccgggccccgctcccgggggcctgagccgcctcactagcgctccatggagaacttccaaaaggtggagaagattggagagggcacgtacggagtggtgtacaaagccaaaaacaagttgacgggagaagttgtggcgcttaagaaaatccggctcgacactgagactgaaggtgtgcccagtactgccatccgagagatctccctccttaaggagctcaatcaccctaacatcgtcaagctgctggatgtcatccacacagaaaataagctttatctggtgtttgaattcctgcaccaggacctcaagaagtttatggatgcttctgctctcactggcattcctcttcccctcatcaagagctatctgttccagctgctccagggcctagcattctgccattctcaccgtgtcctgcaccgagaccttaagccccagaacctgcttatcaacgcagaggggtccatcaagctggctgactttggactagcaagagcctttggagtccctgtccgtacttacactcatgaggtggtgaccctctggtaccgagcaccggagattcttctgggctgcaagtactactccacagccgtggacatctggagcctgggctgcatctttgccgaaatggtgacccgcagggccctattccctggagactctgagattgaccaactcttccggatctttcggactctggggaccccagatgaggtggtttggccaggagttacttctatgcctgattataagccaagtttccccaagtgggctcggcaggattttagcaaggttgtgcctcccctggatgaagacggacggagcttgttatctcaaatgctgcactatgaccccaacaagcggatttcagccaaagcagccctggctcaccctttcttccaggatgtgactaaaccagtgccccaccttcgactctgatgtccttcccaaagccctcttcacctgtggtctgacctgatcctgggccttttggacacaggtcagccttctgctgttttctggctgtcttagccttttctctgggccagccggttctggggattcagaggtgcagagaaggattaggtgaaaagggagaaagttttggcattagatgcacttaacccgacttccagcttctctccctcttcccagtcatcactgagaaggattagtattgaagcaaaactgacagttctccccagtgtcagattttgccatcccaaccttaagactgtctcatagttaccgtgttgagggaaatgcccccagactcctgctgacaatgttttctaaactaatgagcagaagcctaagttgggacagttcagaaccaagcaagaggggtccattttaatgaattagagtaaaaaaatagacctaagccatttgtaccttagtcttagtgtttggcctcatctagcaaccaggaagcctggttggagaaacagaagaaatgattccctccagagccctgtctcccttccccaggcaagaagagccaggagggcacaggcttacgcttcactctgatctgtgtgcttcacagggcaaggtgaaagacacttgaatttccctttttagcaatcttactgttttctggtgctgccggctgaacccaggaccttgccctcactaagcaaatgtacctaccaccagtgagccagatttcgttcgagccctcctttgggaagttcagttcttcagttgtcagagagccttattaccatcttcctctgagagccaccctcactcctagtagtggaagcgagctaggagacatttcgagaatgctgatactttttaaaggctgggttaggtcattgggggaaattttctataaaagagtgaacaattatatttatattttcaagttagaatagtttggatatttcaatggttttttgtttgttgtttctttttttcttttttgtcagtgtggatggatttgttaccatgtgcactttgggattttttttttaattgtttaaagaaaatatttcttttatgatttccttctcccaccccgtgttgttaatattatttgtaatttagtttgtaattcattaaaagaaaatattctcaaaaaaaaaaaaaaaaaaaaaaaaaaaaaaaaaaaaaaaaaaaaaaaaaaaaaaaaaa

SEQ ID NO: 212 - DNA, 2248 bp, Rattus norvegicus
caggagcccaatggccaactatgaattttcccaggtgtctgaggacagacctggctgccgcctcactaggaaagcccagatcggtcttggagtgggtctcctgctcctggtcgccttggtagtggtcgtggtcatagttctgtggccgcgctcacccctggtgtggaaagggaagcctaccacgaagcacttcgctgacatcatcttgggacgctgcctgatctatactcaaatcctccggccggagatgagagatcaggactgcaagaagatactaagtacattcaaaagagggtttatttccaagaatccttgcaacatcaccaatgaagactacgcaccactggttaaattggttactcaaaccataccatgtaacaagactctcttttggagcaagtccaaacacctggcccatcagtatacttggatccaggggaaaatgttcaccctggaggacacactgctgggctatattgcagatgatctcaggtggtgtggagaccccagtacttccgatatgaactatgactcttgcccacattggagtgaaaattgtcccaacaaccctgttgctgtgttctggaatgtgatttcccaaaagtttgcagaagatgcctgtggtgtggtccaagtgatgctcaatgggtccctcagtgagccattttacagaaacagcacctttggaagtgtggaagtctttaatttggacccaaataaggttcataaactacaggcctgggtaatgcatgacattaaaggaacttccagtaatgcatgttcgagcccctccataaatgagctgaagtcgattgtgaacaaaaggaatatgatatttgcctgccaggataactaccgacctgtaagatttcttcagtgtgtgaagaatcctgagcatccatcatgtagacttaatgtgtgaaggacttggatctcagaatccccacacacactccgcagcacgcaatgaggtgaaagattcagaagcaacactgtcgggaaagcagcagttgtcagggagaggtctctactacaatgctaacatcagagatggaagagcttcccaatacattatgacagaacgacacgatcagctcagtgcgtcctgtgtactaccagtaatagtcaagaaaagtcactccataaaccagagttaaggttctatattgttatttcaatgtggtgcttttatattgtttatattttgctagcatccttttttcctctcttttaatgaggtctctctttctctcttaatgaggctgagaatcagacctgagaacttgcacacatggtggataagcctatataccactgagctaactcctcagcatggctggatttttattgaaaaatgccaatccaacttcccattggacaaagaaaatcaaacatcaagtttatcgaaatgaataaccttatttttttatgtttttgcattctccccacaaatattcaaatggtaaacatgaggtcatagggtcattatagagaaggtgctctgtggaaactacccacatgccctgtgctttagtcgatttttaacccatccaacatgtccttgttaactttgagttttattgggggggattggggggggttaacgtgagaaaatggagtttagagagataatttattttcctaaagtcacattcttaggatcatggttacatctgaaattaaatcagttctgtcaaagtcaacaacataagtttttttttttcttttctgagcttttattgccaaattgatagtagcctgtgttatcgtctagcaatagactctgcaatgtgatctttatgggtgatttcgaaactaattacttgcactctctttctcttcttcctcattcttggtgccttctgtaggtagtcaggagttagcttacatttgttgctgatatcggcaatttatgttttttatcctttttttcttacatctgtcttgctcggagtcactaatttggttgttattttgttgttgttggttgtctttttcaaagctccactctttacccttcctcatttatttatttaattgagcttttgtctatttttagaaacatagaaatttcttctgtcttcaatatctccatttagcttttttgaggcaaatgtttagaccattgctatttcagcctgttctcttttttcttttttataggatattttatgtatttacatttcaaatgttatcccctttcccagttcccccgccctgattctatgaggatacttccccttccaca

SEQ ID NO: 213 - DNA, 4469 bp, Rattus norvegicus
cgtgcggtcggagcgtagagctcagcgcagagcaccgggagccggagccttagcgggaggtgcatccaaagcccggccgttcggagcccgcgagcgatgatgtcatcctacaagcgggccacgctggacgaagaggatctggtggactcactctccgagggcgatgtgtaccccaatggcctacaggtgaacttccgcagcccccggagcggacagaggtgctgggcagctcggacctcggtggagaagcggctggtggttctggtgacgcttctggcagcagggctggtggcctgcctggcagccctaggcatccagtaccggacaagaacgcctccggtatgtctgactgaggcctgtgtctcagtgaccagctccatcctaaactccatggaccccacggtagacccctgccaggacttcttcagctacgcctgtggtggctggatcaaggccaaccccgttcccgacggtcactcacgctgggggaccttcagcaacctctgggagcacaaccaagccatcattaagcatctgctggaaaattccacggccagcgcgagcgaggcagagaaaaaggcgcaagtgtactaccgtgcgtgtatgaacgaaactaggatcgaggagcttcgggccaagcccctgatggagctgattgagaagctcggaggttggaatatcacaggaccctgggccaaggacaacttccaggacacgctgcaggtggtcacagcgcactaccgcacctcacccttcttctctgtctatgtcagtgccgactccaagaactccaacagcaatgtgatccaggtggaccagtccggccttggcttgccctccagagactattacctgaacaagacggaaaatgaaaaggtactgactggctatctgaactacatggtccagctggggaaactgctgggtggtggggacgaggactccatccggccccagatgcagcagatcctggattttgagaccgctctggccaacatcaccatcccccaggagaagcgccgggatgaagagctcatctaccacaaagtcacggctgctgagctgcagaccttggcacccgccatcaactggttaccctttctgaatgccattttttacccagtggagatcaatgagtctgagcccatcgtggtctacgacaaggaatacctcagacaagtctccacactcatcaacagcaccgacaaatgcctgctcaacaactacatgatgtggaacctggtacggaaaacaagctcctttctcgaccagcgctttcaggatgccgatgagaagttcatggaggttatgtacgggacaaagaagacctgtcttccccgctggaagttttgcgtgagtgacacagaaaacaacctgggctttgccctgggccccatgtttgtgaaagcaacctttgcggaggacagcaagaacatagccagcgagatcatcctggagatcaagaaggcattcgaggagagcctgagcaccctgaaatggatggatgaagatactcggaggtcagccaaggagaaggcggacgccatctacaacatgataggctaccccaacttcatcatggaccccaaggagctggacaaagtgttcaatgactacacagcagttcccgatctctactttgagaacgccatgcgatttttcaacttctcattgagggtcacagccgaccagctcaggaaagcccccaacagagatcagtggagtatgaccccgcccatggtgaacgcctactactcgcccaccaagaacgagattgtgtttccagctggaatcctgcaggcgccattttatacccgctcttcgcccaacgccttgaactttggtggtatcggggtcgttgtggggcacgagctgactcatgctttcgacgatcaaggccgggagtatgacaaggatgggaacctccggccctggtggaagaactcgtcggtggaggcattcaagcagcagaccgagtgcatggtacagcagtataacaactacagtgtgaacggagagcccgtgaatgggcggcacaccctcggggagaacatcgcggacaacgggggactcaaggcagcctaccgggcgtaccagaactgggtaaagaagaacggagctgagcagatactgcccaccctgggtctcaccagcaaccagctcttcttcctgggattcgcacaggtctggtgctcggtccgcacaccagagagctcccacgaaggcctcatcaccgatccgcacagcccctcccgcttccgggtcatcggctcactctccaactccaaggagttctcagaacacttccgctgcccgctcggctcccccatgaaccctcgccacaaatgcgaagtctggtaagggctgaagcgcagagaacacaggtggaagaagggaaggggcctgcagccagctcccgggaacagggccgcgctgtcaccctccttccagcccctcggccgagggccccttccccaccctggagggtatgcagccatcttgtctaagcctatgccagaggctcagcactggaagccaacatttgacccccttcgaagctccagcatcccagacacccttgagtgatgctataccgggcctttgggtgtgtcaagctggtggcttgccagccctgggcctcacactgacaatggcagtgggacaggaccctttgccacgtccaatgccagatataccacaataccactgtgtcaaatgctttaaagatatattttttggggagactattttttaagcattatggaatacactggaaatcttcagggaaaatgcatttaaaacacttttttttaaaaaaagattagtatatttattatgttctctcttttttttctaaacaacctgcggacaaaggaaaccccactgattgaccccaggggaccccaggctgttgagcaggccaccagtttgagcactgctttagcccattgttggtgtaattgcttgtgcagtcaggagatgtaggggccaggcagaaggggtggccagctgaagggcctgatttatgagcatggccttctctgtcctgtctccggagtccaaccatgggaaccccaacaaggacgggctgttacccaagttgatccctatggcagtacaaagccagagtaatggcctccgtacaaccgggggacccctgaacactctggacaacatcacaggagcccgtcggggctgagaccccacaccccatcagatgcacactattgtccaaagatgtcttgttttggtcccacctcttctggccttgggaccggttgcctctctgtagcagttctgacatcctgaagtggtcgccctctgtaccaggggaaaggggaaagagaaagcagtccagttctccctccaagctccgtagcctgtagttaccctggcttggctcctgggaccccttctctagtgccttaccccaggccacagcccctgagcccctttgaggaggcagcatttgtcttgctttctcagtggagcccccaagtgtcctgactagaagccaacaccatagccccactcccagaagccccagggtaccgtcccaaaccctacaggacagccattccacacattccccaccccacccccctctgcagcaggccaagactggaaggttcccagccccatcgggctccagggaatggcaggatgtcatccacccacagcatcacctaacagatatgtgggcctccactaagtggcgctcactgaggttttcatgactgctgtagggagcaagctcttgtgacctgtgtgtgaggagcgcagtagaagtgcccatcacagcccctggcaagtcatgcccccacatagcacaacacacacacacactcacctggaagccagagtcctccttggccaagacgcagagacagtgtagtctcggtcctgctagcgtagcgatagtcttagcactgggatggggagctgcaagcgggtgtctggcaaggttcttggtccctgtgaacacattcgaggtctcagctcttcggggaaaagtaacacaggaagcaggaaggtgctggagccacgccctgccacacaggggggaccttctgggtgggatcatctgccctttctatcccctcgccctgcttccccacaggtggccgtcctggatgccagtatctagaagcagggtcctgagctggagttagccatgcacgcattgctcagggtgtgcagggagccaaggcaggaaaacccaggctggttagggatggatgggtgcaaaagcagcatcccgacccctgtccctccagagatttgagaagggcagaattaggaagggcacccgccctcagaaagagccctcctctcaagcccggagtttccctgcaggcacaaggacatggggtttggaactggggactctatttttttgtattattgtgttttgtgctactgtagttttggtgtggcacctattataattaaaataaagtacttatacc

SEQ ID NO: 214 - DNA, 3335 bp, Rattus norvegicus
gtacgcgggtagcacggcctctggccgtggagcaccatgaagtacctggtgagtgtgggcgcggggccggccaggcgggcgggcggtctggaggacgtttcctgggggccccgagtgtcccgccggccgcagagttaccgggcagctcggcacgtaaacgagtccctccctcggtccgcctttcgagtccccgcagctcacggagctagcgtgacgccctccgcagcccttgggtccgggttgcctgagactcagcccgaggcggtatgcagagggactgagaaaccgagatttgctgagggctgcaaaccggcggcgagccgcgacaagaacgtgctggccaaagccctctatgacaacgtagctgagtctccggatgaactctccttccgaaagggtgacatcatgacagtgctcgagcgggacactcagggcctggatggctggtggctctgctcactgcatgggcgccagggcattgtgcctggtaaccgcctcaagattctggttggcatgtatgacaagaagccagcagcacctggaccaggcccacctgccaccccaccccagccccagcccagccttccccagggcgtccatactccagtgcctccagcttcccagtacagtcccatgctccccactgcataccaaccccaacctgacaatgtgtacctggtacccactcccagcaagactcagcaaggtctctaccaagcccctgggcccaacccacagttccagtcacccccagccaaacaaacatccacattctcaaagcaaacacctcatcactcatttcccagccctgccacagacctttaccaggtgcctccagggcctggaagtccagcccaggacatttaccaggtgccaccttccgctggcacagggcatgacatctaccaagtccctccatctttggacacccgcagctgggagggaacgaagccaccggcaaaggtggtggtacctactcgagtgggacagggctatgtgtacgaggcctcccaggcagaacaggatgagtacgacaccccgcgccacctgctagctccaggttcccaggacatctatgatgtgccccctgttcgaggactgcttcccaaccagtatggccaggaggtatatgacaccccgcctatggcagtcaaaggccccaatggccgagacccgttgttggatgtgtatgacgtgccccctagtgtggagaaaggcctgccgccgtccaaccatcattcggtgtatgatgttcctccttctgtgagcaaggatgtgcctgatggcccactgctgcgtgaggaaacatatgatgtaccccctgccttcgccaaacccaagccttttgatccgacccgacatccattaatcctcgctgcacctcctccggactccccaccagctgaggatgtgtatgatgtgccaccccctgctcctgacctctatgatgtgccccctggtttgcggcggcctggccctggaacactgtatgacgtgcctcgagagcgggtgctccctcctgaggtggctgatgggagtgtaattgatgatggtgtgtatgctgtgcccccaccagccgagcgagaggcgccaacagatggcaagcgcctgtcggcctctagcacgggcagcacacgcagcagccaatcggcgtcttccttggaggtagtggtgccaggtcgggagcccctggagctggaagttgctgtggagaccctggctcggctacagcagggtgtgagcaccaccgtagcccaccttctggacctggtgggcagtgccagtggccccgggggctggcgtagtacctctgagccccaggagcctcccgtgcaggacctgaaagctgcagtggccgcagttcatggggcagtacatgagctcctggagtttgcccgcagtgcagtgagcagtgccactcacacttctgaccgcactttgcacgccaagcttagccggcagctacagaagatggaggatgtgtaccagacactggtggtccatggtcaggtccttgacagtggccggggaggtccaggattcactctggacgacctggaccgcctggtggcctgctcacgggctgtgcccgaggatgccaagcagctggcctcctttttgcatggtaatgcctcgctgcttttcagacggaccaaagcccctggccccgggcctgagggcagcagctccctgcacctcaaccccaccgataaagccagcagcatccagtcacgccctctaccctcacctccaaagttcacctcccaggactctccggatggccagtatgagaacagtgaagggggttggatggaggactatgactacgttcatctgcaggggaaggaggaatttgagaagacccagaaggaactgctggaaaagggcaacatcgtgcgacagggaaaaggccaactggagctgcagcagctgaaacagtttgagcgactggagcaggaggtgtctcgtcccatagaccatgacctggccaactggacaccagcccagccccttgtgccggggcggacagggggactggggccttcagaccgacagctgctgctcttctacttggagcagtgtgaggccaacctgaccacactgacagatgcggtggacgccttcttcaccgcagtggccaccaaccagccacccaagatctttgtggcacacagcaagtttgtcattcttagtgcacacaagcttgtgttcattggggacacactgtcacggcaggcaaaggcagctgatgtgcgaagcaaagtgacccactacagcaatctgctgtgtgacctcctgcgtggcatcgtggccaccaccaaggccgctgccctgcagtacccatccccatctgctgcccaggacatggtagacagggtcaaggagctaggccacagcactcagcagttccgccgtgtcctgggccagctggctgccgcctgaaagcagaagactgggctgtgaggctggggagtgggtagcggtggtgtgagctacccaggcgctcgtcttgaagtggagatcctgcaggtttggggacaggtaaccccagctctgctttgggcctggtgccctcaactgtccagggatttgtacatatttatatcaaggcaggatgcagaatgcctcctcggagaggctgaggagccccgtcagagtggaccatgggctgggatcaccagggttggggcacatgggctccagtccacagggctccctgggacaggaagtacagtgtggtgtacacctctgcaccaagaaaacctaaagaactatttttcactattgatttttttccaatcatttgactaatagtctacatttaataaaatttt

SEQ ID NO: 215 - DNA, 2777 bp, Rattus norvegicus
gaaagaaagagccttattttctggctaaacaggtttacacagctacaggaacaatggattccaggctagctttagccacggaggagcccattaagaaagacagcctgaagagatataagatcctttgtgcggttcttcttgctttgctggtgatcgtgtcgcttggattgggcctgggcctgggactcaggaaacctgaagagcatataggcagctgcaggaaaaaatgctttgattcgtcacacagaggactggagggttgccgctgtgactccggatgcacagaccggggagactgctgctgggactttgaagatacctgtgtgaaatcaactcaaatctggacgtgtaattcgttccgctgtggggagaccagactagaggcagccctctgttcctgtgcggatgactgtctgcagagggaggactgctgcactgactacaaggctgtgtgccaaggagaagtcccatgggtgacagaagcctgtgcctcatcccaggagccccagtgtccagaagggtttgaccagccgccggttatcttgttctccatggacggctttagagctgagtacttacaaacatggagcaccctgctgccaaacattaacaaactgaaaacatgtggactccattccaaatatatgagagcagtgtatcccaccaaaacctttccaaatcattataccattgtcacgggtttgtatccagagtcgcacggcatcattgacaataacatgtatgatgtgtacctcaacaagaatttttcactttcttcagtggagaaaagtaaccctgcctggtggagtgggcagccgatttggttaacagcaatgtatcaaggcttaaaagctgcttcctactactggccaggatcagatgtggctgtcaatggctccttccctaacatctacaggaattacagcaattccgtcccatatgaaagtaggattgctacactgttgcaatggctggacctgcccaaagctgaacgacccagtttttacaccatatatgtggaagagcccgattctgcggggcacaagagtggaccagtcagtgctggagtcattaaagccttacagttagttgatgatgcctttgggatgttgatggagggtttgaaacagaggaatttacacaactgtgtcaacataatcgttctggctgatcatggaatggaccagacctcttgtgacagagtggaatacatgacagattattttcctgaaataaacttctacatgtaccaaggacctgcccctcgaatcaggactcgtaatatacctcaggacttctttacctttaattccgaagagattgtcagagacctcagctgtcgaaaatccgatcaacacttcaaaccctacttgactccggatttgccgaaacgactgcactatgccaagaacgtcaggattgacaaagttcatctaatggtggatcggcaatggctggcttacaggaacaaagggagttccaactgcgaaggcgggacacacggttacaacaatgaatttaaaagtatggaggcaatctttttggcacatggacccagctttaaagagaagactgttatcgaaccatttgaaaacatcgaagtctataatctactgtgtgatcttctgcacatccaaccggcaccaaacaacggttctcacggtagcctgaatcatcttctgaaggcaccattttaccagccgtcgcatgcagaagaattgtcaaagtctgctggctgtggttttactactccattgcctaaggactcactaaactgctcctgcctcgcactgcagacttctggtcaagaagagcaagtcaaccaaagactaaatctcaatagaggagaggtctcggcaacagagaagacaaatttgccatttgggaggcccagggtgatacagaagaacaaagaccactgtctgctttaccacagggaatacgtcagtgggtttgggaaagctatgaagatgcccatgtggagttcatacactgttcccaagccgggagacacatcatctcttcctcccacagttccagactgtctgcgggctgatgtcagggttgatccttcggagagccaaaaatgttccttctatttagcagaccagaatatcgaccatggcttcctctatcctcctgcaatcaaaggaaataatgagagtcaatatgatgctttaattacaagtaatttggtcccaatgtataaagaattcaaaaaaatgtgggactacttccataaagttctccttataaaatacgctatagaaagaaatggagtgaatgtggttagtggacccatatttgattacaattatgatggccattttgatgcccccgatgaaatcacaaactatgtagctggcaccgatgttcctgtcccgacacactactttgtggtactgacaagctgtaaaaacaaaacccacacacccgacagctgccctgggtggctggatgtcctgccctttgtcgtccctcaccggcccaccaacgtggaaagctgtcctgaaaacaaagcagaagacctttgggttgaagagagatttaaagcacacatcgcccgggtccgtgatgtggagctcctcactggccttgacttttatcaggaaaaaacacagcccgtctctgaaattttgcagctgaagacatatttgcccacattcgaaaccattatttgaatagatgtgtaaagccatttgacaaaatggaaacattttctgtcaagaaattataaaataaaattttctatttttctttaaaaaaaaaaaaaaaaa

SEQ ID NO: 216 - DNA, 1226 bp, Rattus norvegicus
cgcgcgctggcggtggcatgcgcgctgctctgtcccgtctcctgcacgccctcttggccccgctgctcgtacgccagcaatatggcggcgcccagcgaacccgcaggtttccctcgcggcagtcgcttctccttcctgccgggcggcgcgcactcggagatgaccgacgacctggtgactgacgcgcggggccgcggcgcaaggcatagaaaagacaacgcccctgccgcggccccggcgccgaaaggtttggagcacgggaagcgaccgtgccgggcctgcgtggacttcaagtcgtggatgcggacccagcagaagcgggacatcaagtttagggaggactgtccacaggatcgggaagaattgggtcgcaacacctgggctttccttcatacgctggccgcctattacccggacatgcccacgccagaacaacagcaggatatggcccagttcatacatatattttccaagttttacccctgtgaggagtgtgcagaagacataaggaagaggatagacaggagccagccagacacaagcactcgagtgtccttcagccagtggctgtgccgccttcacaatgaagtgaaccggaagctgggcaagcctgattttgactgctcaagagttgatgagcgatggcgtgacggctggaaggacggctcctgtgactaaggattaccacagaccgtgcagggcaacgccgggttctatgggcaacagcctgactgacgattaaagtgcatctgagccaaagcttgtttctgtggtgggggtgggatcccctagaacactgcctatgggaaccctacccacagactcagaaacggaggtgcccactatagacagttgggtggcttcctcaggtcttaaagccccatgggactgaagatgagaggcaggagtggtccagggcaccccataccccttatgatacccattatacatttgggacatagttgcctcaaaggaaggtgggctagaccattgccttcctactacatatccccagctgcctacagaactgtgacccaggcaactctgccatttcagaattgaagcagggttccagctctagttgggtttttctcttagggtaaaccaaccatggtgcccactgtcagcctggcacatggtcttctgcagccaggacaaacatgtcagcagaggatcctgggaagggcttccttagcgtttgagaccaaaataaaatgaagtgactt

SEQ ID NO: 217 - DNA, 2199 bp, Rattus norvegicus
ccggaaggagttcggcaggtctcccggaccccctttgtgaactacattttgggtagaacattttaatcaccgaaacccttctgaggaaaaaaagactcccactgccccctgcaaaaaaacaaaagcaaaaacaaaaaaaccaaaccccaaacccccaaatctcagtcttagctggtgccaccaaagaagcttttgagccatgtggacttttcttggaattgctactttcacctatttttataagaaatgcggggatgtcaccctggccaacaaggagctcctgctgtgcgtactggtgttcctgtcgctgggcctggtgctctcctaccgctgtcgccatcgaaacgggggcctccttggccgccatcagagcggctcccagttcgctgccttctcagatattctctctgctttgcctcttattggcttcttctgggccaaatcaccccctgaatcagaaaagaaagaacagctggagtccaagaggcgcagaaaagaagtcaatctgtcagagacgacgttaacgggagcagctacctcagtatcgacatcatctgtgacggacccagaagtgatcatcatagggtctggtgtacttggctctgctttggcaacagtactctctagagatggaagaacggtgacagtaatcgagagagatttaaaagagcctgacagaatacttggagagtgtctgcagcccggtggctatcgagttcttcgagagctgggccttggagatacagtagaaagtcttaatgcccatcatatacacggctacgtaattcatgactgtgaaagcaggtctgaagttcaaattccatacccggtgtcagaaaacaaccaagtacagagtggggttgctttccaccatggcaagttcatcatgagtctccggaaagcagctatggcagagcccaatgtaaagtttatagaaggtgttgtgcttcggttactagaggaagatgatgctgtgattggtgtgcaatacaaggacaaggagactggggacaccaaggagctccatgccccgctcactgttgttgccgacgggctcttctccaagttcaggaagaacctcatctccaataaagtctctgtttcctcccacttcgttggcttcattatgaaggatgcaccacagtttaaagccaatttcgcggagcttgttctggtcgatcccagtccagttctcatctaccagatttcacccagcgaaactagggtgcttgtcgatattcgaggagaattgccaagaaacttaagagaatacatgacagaacaaatttacccacagatacctgatcacttgaaggaatcatttctggaggcctgtcagaatgctcgtctgcggaccatgccagcaagcttccttcctccttcctcagtgaacaaacgaggcgtcctacttctgggagatgcgtataacctgaggcatcctcttactggtggaggaatgacagtcgctttaaaagatataaaaatatggagacaactgttaaaagatattcctgacctttatgatgatgccgctattttccaggccaaaaagtcattcttttggtcaagaaaaaggagccattcctttgttgtgaacgtgctggctcaggcgttgtatgaactattttctgctacagatgattccttgcgtcagctccgaaaagcttgctttctttattttaaacttggtggagaatgtttgactggtcctgttgggttgctttctatattgtctcctgaccctctcctattgattcgacacttcttctccgttgcagtctatgccacgtatttctgcttcaagtcagagccatgggctacaaaacctcgggctcttttcagtagtggtgctatactgtacaaagcgtgctctataatatttcctctcatctattcagaaatgaagtatctggttcactgaaagggaaaccacatggaagtcattgggacttgaggaggatgtacatagcctaggactgtgtgtgtgacttctgcagtggtgactcaaggaccaagcttgtgtataagcatgtaaatatatgccttaattcacaattgagaatgaagggtcaataagctagatgtttaaaagaatgattgtttccacaaattaatgttaacactcaagtgtttggatttcagtattggggtgattcaattggggacaatgccaaataaaatgaaggagtggaactcctt

SEQ ID NO: 218 - DNA, 4492 bp, Rattus norvegicus
gtggtcgacggtatcgataagcttgatatcgaattccggcaccacaacatagctgatgggtgatgccaaagaagaggcaggcactggtagagtttgaagatgtgctgggggcttgtaatgcagtaaactacgctgcagacaaccagatctacattgctggtcaccctgcttttgtcaattattctaccagccagaagatctctcgccccggtgactctgatgactcccggagcgtcaacagtgtgcttctgtttaccatcctgaaccccatctactccataaccacggatgttctttacactatctgtaatccttgtggccccttgctgatgagggaggcgaagggctgcacctgcagggaggtgcccatgatgatgaggaggtccacctttgagagtctgactgcatgcaggagaagaagcgcggtgggaggttctcaccgaaaaacacgatatcgggctttaccacattctgacacttctcacacttgggagttgcttctgagaagatcttctctttcatccagctcatcgtgtactcttttccacaggaggtgttgacacagtgtgatgtgtagaaggtgccgtgggcctccaccaggtcctggggctccagccccgccactcgttccagagtgtcaatattctgcgtgtagcagcgcagcagcagccccttctccttcagcaggcggatgaagtagtggcagatggtcggcttgaactgcccaggatagagctccttagcaagggcaaagaagggttctggatgtttcttgaagtagctgatctcaaagatggcctctgggtatggaaggtggtatttctccaagtttgcatagaggccagtggatggggagcggaagtcagggattcctgcggatgtggagattccagctcccaccaaacagatgaccctgcgacagcgctcgctctgcatgtagcgtgtcactccttcaagggtcagctcgtccagcagacgctccttctgggaaccaggcccagggtctgggtgaataatattccgcaggaaggtccatctctgcctctccgccagtggctcctccctcagtgtccgagtctgaatcggtccggctcggccatgggaacggggtgggggctctcgggactgtcaccgactgctctgtcccgtgacggctacgagaccgagacccctttttcccccgagggagccttcccaggtggggggccggccgaggaggaaggggtccctcggccacgggctccccccgagccacccgacccaggagcgccccggccacccccagacccgggtcccctcccactcccagggtcccaggagaagccaacctttgtagttcaggtgagcaccgagcagctgctgatgtctacgggaggatgtgacaaagaacctcctaggggacaaggggtcgacacccggggagacaggacccaggaaggcggggagaagccccgcgaacagagagaagggcccaggcccgaacagggacctgacatccctggtcagcaggaagaaagtccccagcaggagccttccagtgaacggggtgacagtgttggagaacgggaagccaggagtcccggacatgaaggagaaggtggcggagaatggcctggaatctccggagagaggagagagagccctggtgaatggggagccgatgtccccagaggccggggagaaggtgctggcgaatggggttctgatgtccccaaagatcgaggagaaggtggcagagaatggggtcctgaggctgcccaggaacacggagaggccgccagagactggacttcggagagtcccaggaccctgggagaagatgcccgagactgggggtctagctcccgagacgctgctggatcgagcccctgcgccctgcgaggcagtcttgccccagaacggcttggagatggcccctggccagcttggcccagtccccaagagcgggaacccggaccccgggaccgagtggagagtccccgagagtgggggggcaccgagagcccccggggctgggaagctggacctcgggagtgggggccgagccccggggggcgcggggacggtccccgccggcggccccgcaagcgccgtggacgcaaaggccggatgggtagacaactcgagaccactgccacctccgcctcagccactgggggcccagcagaggaggccggagccagtgcccctgaaggccaggccggaggtggccccagaggaagagccaggggtcccagacaacaggctcggcggagacatggcccccaacgtagacgaggacccccccaagccggagaggaagggcccggagatgccacgcttgttcttggacttgggaccacctcaggggaacagcgagcagatcaaagccaaactctcccggctctcgctggcgctcccaccgctcacgctcacgccgttcccgggcccgggcccgcggcggccaccttgggagggcgcggacgcaggggcagctggcggggaggccggcggggcgggggcgccggggccagcggaggaggacggggaggacgaggacgaggacgaggaggacgacgaggcagcgggctctcggggacccgggaggacgcgggaagccccagtgcccgtcgtggtgagcagcgccgacggggacacggcccgcccgctgcgggggctgctcaagtctccacgcgcggccgacgagccagaggacagcgaactggagaggaagcgcaagatggtctccttccacggggacgtgaccgtctacctcttcgaccaggagactccaaccaacgagttgagcgtccagggcacccccgagggggacacggagccatcaacgcccccagcgcccccgacgcctccccaccccaccaccccaggagatgggtttcccaacaacgacagcggctttggcggcagtttcgagtgggcggaggatttccccctcctccccccaccaggcccccccctgtgcttctcccgcttctccgtctcacctgcgctggagaccccggggcctcccgcccgggctcccgacgcccggcccgcaggccccgtggagaactgactccccaaagacccagcccttttgcaccccaagaagagggtttgcgagcagaatcttgtgtggacgatggagccattgcccccgacactgacacagcctctggggaggtgcctgaggctgggccctccctctcctccaccatgtgccaaatgggaaggcccaggccctcccccaagtcccccagatgagtcccctgatccccctgatccccccgaccccctcggagccacatgaggcagaaagccccatcgctgaacagccacacttcttggaactgaactgaactctgtgggcccagagcccctggcacagcagaggcccctcctggcctcatgagggtcactggcttcaggaacctgggcccccatcttgcgtctccccttcccccaagcctggcccctagagggggcctctaattcaaaccttcgcgtgacattttcacattatttaaaaaaaaaccggaatttttttttttttttctttgttttagtcaccatcttaggcttttactgctgtgaacagacaccattaccaaggcaaatcttataaggacaacatttaattggggctggctttcaggttcagaggttcagtccattattatcaatgcaggaacatggcagcatccaggcaggcatggtgcaggcagagctgagagttctacatcttcatttgatgtctgctagcagaatattggcttctaggcaactaggttaagggcttaaagccacaagcacagtgacacacctattccccttctaatagtgcactccctggactgagcatatacaaaacatcacagtcccaataactagtgccaagggacataaaatgttctgccagtggttaaaagtatcttctgtgctttttgaaatttcttgggctactccaatgaaagctgtgtatgtatctctccctgcacagctttcattggagtagcccaagaaagctgtgcagggagagatacatacaccgttctttactggtgatagcatccccaaagtttaccaaagaatagctcttgcttaatatctagacatgctctcaatttgttagctatgcattttctccaccgcagccacctgaggttagcaatcagcgggtgcatgagttcactccacagggttgctaccgaattaattcgcggccgccacaactccagtgctgttggcccatggggaacgggcggagtggccactgaggagtttctccctgtcaccccaattctggaaggctttgtcattcttcgaaagaaccccaactacaatctttgaaaaatggctgacactagagaccctggctgcagctgactttttttagcaggctgtactgcccctgccaggggcagatactgttccagatctttgggggaattgttacctcctgctgttttgttactgagtaagataatcttgtcgaataaagacctttatcccc

SEQ ID NO: 219 - DNA, 797 bp, Rattus norvegicus
caacgatgaagtagcactggaggtcccttggaaaatgaggccagggtccctgctccagctcactctgctgctcgccctgcccaggagcctctggggcagagggtgtacttctccaccctgcgaatgccaccaggaggacgacttcagagtcacctgcaaggaactccaccaaatccccagcctaccgcccagcacccagactctgaagctcatcgagactcacctgaagaccattcccagtcttgccttttcgagcctgcccaatatttccaggatctatctatccatagatgccactctgcagcgactggagccacattctttctacaatttgagtaaaatgactcacatagaaatccggaacaccagaagcttgacttacatagaccctgatgccttaacagagctccccttgctcaagtttcttggaattttcaatactggacttagaatattccctgacttgaccaaaatttattccacggatgtgttctttatactagaaatcacagacaacccttacatgacgtcagtccctgaaaacgcattccagggactatgcaatgaaaccttgaccctgaaactatacaacaatggatttacttcaatccaaggacatgctttcaatggaacaaagctggatgctgtttacctaaacaagaataaatatctgacagctatagacaaagatgcctttggaggagtatacagtggacccactttgctgttccgcacttgaaaaaccccaggcctggtaatgccaactttcttggtttaaataaaggaagtctttgtta

SEQ ID NO: 220 - DNA, 2343 bp, Rattus norvegicus
ggcacgagctgaagtcactgggtgtgtgagagggagtagctcagagccctgcagcttcaggagtgctcactgttgccttccctccccactaggatggcttgccttcttcctgctgctcgacttcctgcaggctttctcttcttagtgctctggggctcagttctaggtgacaagctgctggtggtcccccaggatggcagccactggcttagcatgaaggagatagtggagcacctcagtgaacgcggacacgacattgtggtgctagtgccagaagtcaatttgcttttgggagaatccaaatactacaggaggaaaagcttcccggtcccctacaacctagaagagttgcggacccgctatcgctcctttgggaacaaccactttgctgccagttcccccctgatggctcctctaagagagtacaggaacaacatgattgtcattgacatgtgctttttcagctgccagagcctcctgaaggactcggccaccctcagcttcctcagggagaaccagtttgatgctctgttcacagacccggccatgccctgtggtgtgatcctggctgagtatctcaagctgccttccatctacctcttcagaggtttcccatgctctctggagcacatgcttggtcaaagcccaagccccgtatcctatgttcccagattctacaccaaattctcagaccacatgacatttccccaacggctggccaacttcattgctaacatcttggagaactacctttatcattgtctgtactcaaagtatgagatccttgcctcagacctcctcaagagagatgtgtccctacctgccttacaccagaactctctgtggctgttacggtatgattttgtgttcgaatacccccggccagtcatgcccaacatgatcttcattggagggaccaactgcaagaagaaggggaacctgtctcaggaatttgaagcctatgtcaacgcctccggagaacatggcatcgtggttttctctttgggatccatggtctcagagattccagagaagaaagcgatggaaatcgctgaggctttgggcagaattcctcagacggtcctgtggcgctacaccggaactagaccatcgaaccttgcaaagaacactattcttgtcaaatggctaccccaaaacgatctgcttggtcatccaaaggctcgggcgttcatcacacactccggttcccatggtatttatgaaggaatatgcaatggggttccaatggtgatgatgcccttgtttggtgatcagatggacaacgccaagcgcatggaaactcggggagctggggtgaccctgaatgtcctggaaatgactgccgatgatttggaaaacgcccttaaaactgtcatcaataacaagagttacaaggagaacatcatgcgcctctccagccttcacaaggaccgtcctatcgagcctctggacctggctgtgttctgggtggagtacgtgatgaggcacaagggggcgccacacctgcgccccgccgcccacgacctcacctggtaccagtaccactccttggacgtgattggctttctcctggccatcgtgttgacggtggtcttcattgtctataaaagttgtgcctatggctgccggaaatgctttgggggaaagggtcgagtgaagaaatcacacaaatccaagacccactgagaagtggcaggaagtgaaggagaagtattagtcccttatccaatcagttgaaacttggaaacaagtgttaaatccatgttgcttttattagggaaataattcaccatacactatacacccagaacatttttttttctttttctttttttcggagctggggaccgaacccagaacattttttttttaaataaaaacaatctaattgctggccacacccatcagggaagatactggaatatgtgatctgtttctccagtatcttcagtctggacaatgactgccatctgttggtaacttacagaaagtttagtgttctgttctgccttcagtgacagcaccacagtttcccttactcctgtcagctaatggcttcctcccctggattctcagaccagtgtggccttcccagtgttagtcattcctcactgtgctcatgttttgtgggtggcacggcctttgagctttgggagaaaacaagatgaggctgtgacactggtggccctgtgtttgagataataattattgcttgtctctgaatttgatgaaaactgaagtacattctaaagaaagtatgtcttctattgtgttcccaaaccaagaacttgtcaataaattcatataaattgtattattacttttaaaaaaaaaaaaaaaaaa

SEQ ID NO: 221 - DNA, 2241 bp, Rattus norvegicus
accatggctccttcaggctgtccaccctcccttcctctgtgtgtttgtctgttcctggcctctggctttgcccaggcaggcaggctgctggtagtgcccatggacgggagccactggttcaccatgcagatgattgtggagaaactgagtcacagagggcatgaggtggtggtagtcatcccagaggtgagttggcacatgggaaagtcgctgaattttaccgtgaaaacttactcagtttcttacactctggaagatttaaactaccacttcaagttttttgctcacaaccaatggaaaactcaagaagtagggatgttttctctactgaagcattcaggcaaaggtttcttcgaattactgttttcacactgtagaagtttgtttaaggacaagaagttagtggagtacttgaagcagagttcgtttgatgctgtgtttctggatccttttgatgtgtgtggcttaattcttgccaagtacttttctctcccgtccgtggtcttcagcgggggaatattttgccactaccttgatgagggtgcccagtgccccagtcctccttcttatgttcccagaattctctcaaaattcacagacaccatgactttcaaggagagagtgtggaaccatctctcctacatgaaggagcgtgcattttgcccctactttttcaaaactgccgtagaaattgcctctgaagttctccagaccccggtgactatgagagacctcttcagcccagtgtccatttggatgtttcgaactgactttgtgctggagttccccagacctgtgatgcccaacatggtctacattggtgggatcaactgccaccaggggaagccactttccaaggaatttgaagcctatgtcaacgcctccggagaacatggcatcgtggttttctctttgggatccatggtctcagagattccagagaagaaagcgatggaaattgctgaggctttgggcagaattcctcagacggtcctgtggcgctacaccggaactagaccatcgaaccttgcaaagaacactattcttgtcaaatggctaccccaaaacgatctgcttggtcatccaaaggctcgggcgttcatcacacactccggttcccatggtatttatgaaggaatatgcaatggggttccaatggtgatgatgcccttgtttggtgatcagatggacaacgccaagcgcatggaaactcggggagctggggtgaccctgaatgtcctggaaatgactgccgatgatttggaaaacgcccttaaaactgtcatcaataacaagagttacaaggagaacatcatgcgcctctccagccttcacaaggaccgtcctatcgagcctctggacctggctgtgttctgggtggagtacgtgatgaggcacaagggggcgccacacctgcgccccgccgcccacgacctcacctggtaccagtaccactccttggacgtgattggctttctcctggccatcgtgttcacggtggtcttcattgtctataaaagttgtgcctatggctgccggaaatgctttgggggaaagggtcgagtgaagaaatcacacaaatccaagacccactgagaagtggcaggaagtgaaggagaagtattagtcccttatccaatcagttgaaacttggaaacaagtgttaaatccatgttgcttttattagggaaataattcaccatacactatacacccagaacatttttttttctttttctttttttcggagctggggaccgaacccagaacattttttttttaaataaaaacaatctaattgctggccacacccatcagggaagatactggaatatgtgatctgtttctccagtatcttcagtctggacaatgactgccatctgttggtaacttacagaaagtttagtgttctgttctgccttcagtgacagcaccacagtttcccttactcctgtcagctaatggcttcctcccctggattctcagaccagtgtggccttcccagtgttagtcattcctcactgtgctcatgttttgtgggtggcacggcctttgagctttgggagaaaacaagatgaggctgtgacactggtggccctgtgtttgagataataattattgcttgtctctgaatttgatgaaaactgaagtacattctaaagaaagtatgtcttctattgtgttcccaaaccaagaacttgtcaataaattcatataaattgtaaaaaaaaaaaaaaaaaa

SEQ ID NO: 222 - DNA, 858 bp, Rattus norvegicus
atgggaatccaagggttcctgcagaaactctcaggactgctgctcctgctgtgtgccctgccctgggctgaaggtggaaaggtgctggtgtttcccatggagggcagccactggctgagcatcagggatgtcgtgagggagctccacgcccgaggtcaccaggctgtggtcctggctccagaggtgactgtgcacatcaaagaagaggacttcttcaccctccaaacctaccctgttccatacaccaaggaagagtacaggcaccacttgctgggccaccttcaaaattttttcgaaactgaattttctctgaagttagttctacagacaatggcagctgtaaataacgtatcaacattctatgtgagatcttgcaggggtctgctgcataacacagctctgatccagagcctgaactccagctccttcgatgtggttttaacagatccctttttcccctgtggggcagtgctggccatgtacctgcgtgttcctgctgtgttttttctgcaatccatgctctgtgaactggaatttgaagcaacaaacagtccaaacccttcttcttatattcccaggttactaacattgaattctgaccacatgagcttcctagacagagtgaagaatatgctttatcctgtgccatggatgtatttatgccatgttaattatggctctctggcgagacttgcgtcagaccttttgcagagggaggtgtccgtggtagagatcctcagacatgcctctgtatggctgttgagaaaggactttgtgttccactaccccaggcccttcatgcccaacatggtcttcattgggggcataaactgtgccaacaggaagccactgtctcag

SEQ ID NO: 223 - DNA, 3880 bp, Rattus norvegicus
gcctggctccctcgggtccgctcccctttcccgccggcctggcccggcgtcacgctcccggagtctccccgctcggcggcgtctcattgtgggagggggtcagatcaccccgccgggcggtggcgctggggggcagcggagggggaggggccttagtcgttcgcccgcgccgcccgcccgcctgccgagcgcgctcaccgccgatctccctccttgctctgcagccgcggcccatggagcccgccggcccggcccctggccgcctagggccgctgctgttctgccttctgctctccgcctcctgtatctgtgcaggagccagcgggaaagaactgaaggtgactcaggctgacaaatcagtgtctgttgctgctggagattcggccactctgaactgcactgtgtcctccctgacgcctgtgggacccattaagtggttcaaaggagaagggcaaaatcggagcccgatctacagtttcataggaggagaacactttcctcgaattacaaatgtttcagatgctactaagagaaacaatatggactttagcatctgtatcagtaatgtcaccccagaagatgctggcacctactactgtgtgaagttccagaaaggaatagtagagcctgacacagaaattaaatctggagggggaacaacgctctatgtactcgccaaaccttcttcaccggaagtatcgggcccagactccaggggctctcctggacagacagtgaacttcacctgcaagtcttacggcttctctccccggaatatcaccctgaagtggctcaaaaatgggaaagaactctcccatttggagaccaccatctccagtaaaagcaatgtctcctacaacatctccagcacagtcagcgtgaaactaagccccgaggacattcattctcgggtcatctgcgaggtagcccacgtcaccttggaaggacgcccgcttaatgggaccgctaacttttctaacatcatccgagtttcacccaccttgaagatcacccaacagcccctgacgcccgcgagccaggtgaacctcacctgccaggtgcagaagttctaccccaaggctctccagctgaactggctggagaatggaaacttatcacggacggacaagcccgagcatttcacagacaacagggatgggacctataattacacaagcctgttcctggtgaactcatctgctcacagagaggatgtggtattcacgtgccaggtggagcatgacagtcagccagcgatcaccgaaaaccataccgtgcgggcatttgcccactcgagtagtggaggcagcatggaaaccatccctgataataatgcttactacaactggaacgtcttcatcggtgtgggtgtggcgtgtgctttgctagtagtcctgctgatggctgccctctacctcctccgaatcaaacagaagaaagccaagggctcaacttcttccacacggttgcacgagcccgagaagaatgccagggaaataacccagatccaggacacaaatgacatcaacgacatcacatacgcagacctgaatctgcccaaagagaagaagcccgccccccgggtccccgagcccaacaaccacacagaatatgcaagcattgagacaggcaaactgcctaggccagaggataccctcacctatgctgacctggacatggtccacctcaaccgggcacagccaacccccaagcctgagccatccttctcagagtatgccagtgtccaagtccagaggaagtgaatggggctgtggttggctctaggccccatccccacaagttttcttgtcctacatggagtggccatgatgaggacaaccagccagccagccctgtctccagaaggccaggtggcacaggtcctaggaccaggggtaagggtggcttctgtcttccctccgtggctctccaacacctcttggacacccatgtccccttcttctggagctgggtgttgcagaaccagagggggaactggagaaagctgcctagaatccaagaagcgttgtgcctcagcccatcacactgggtctggatcctggtcttggcaacccccaggttgcttccttgatgctccagcgcctggtcttctgtgtggagaagagttcaccatctccatccaacttgagcttcggggccagactccctttagatcagaccgccccatgtgtggaagaactacaccaggagtcaacaagttttcagccaacagtgctagcctccccacctcccaggctgacgagccctgaggagaaggaaccctcttcccctagaccagcagagactccctgggcatgttcagtgtggccccacccttccagtcccagctcgcttcctccagctagcactaactcaacagcattgctctgtggacgcctgtaaattattgagaaatgtgaactgtgcagtcttgaagctaaggtgttagaaaatttgatttgtgctgtttagttgttgttgggtttcttttcttttcttttttttcttcctttttctttcttctttttttcttttcccccttaaaacaacagcagcagcatcttggctctttgtcatgtgttgaatggttgggtcttgtgaagtctgaggtctaacagtttattgtcccggaaggattttcttatagcagaaacagattttttttccaattcccagcaccctgaggaccaagaaggatccctctgttgtcattttcagcactcagcgtcactgggatgagccaggctctgtccccacagctggcccttggcctccatggctactgtggtaagtgcagccttgtctaatccagtgctgacgttggccattcctcattgaggagagaaggtcagtgacaaactcacaagcactgcagaggcatacggagagaagggacgctcggccagcacccggtattccagcgctctgaggtaatcagtgcaaggagtctgttattaccatcagacctcagcaggatcatactggaacagaacctgatcatacctgtgacaacacagctgtgagccagggcaaaccaccccactgtcccagagtctgggcagaggctctgacccccacccttcaaactggatgtcggggcctggctgggcccaatggcaagcagatgttgcaaccctagctatctggtcttaacatgcagctcagtaagttgaggcgctaatgtccccccatgccgggggattcctggttccggctcttcaagtaagaagctgattcaacctgcctgtttctgtaggtgtgacagggatgtcaggaaaacagccaggactcatctctatagggctggtgacctgatacttcccataaaggcatccaggagttagctgacccaatagtcagagttgacctcactggcctagcaaaccgtaacttgtctttggcccagccatggtcttgggctgtcttctaattccaaagggttggtaggtaaagatccatcctcttcccctctgccaagagacatcacgtgtgtacacacacacatgcgcgcgcgcgcacacacacacacacacacacacacacacacacacacacacacacgggtgtataggtgagttaaaaggatgtcctcgctgacatcctaattttgtcttaagtttttttggagggagaaaggaaagaggcagggaagatacgtagctctagctttagtcaggcagcctggggggatccccaagcctatgtatggaaccctggtacgaaagcgccctgtgaggagtgggatttcagttttatctgtagaccagatgagaaggagaaaggccccattttgtacatagttgcaacttaaaatttttggcttgcaaaatatttttgtaataaagatttctgggtaacaatgaaaaaaaaaaaaaaaaaa

SEQ ID NO: 224 - DNA, 1757 bp, Rattus norvegicus
atcaattagtaggttgggaaactcagccttgccaaccatgctcgcacagcccttcagagaagcgctgaccggagactggagacaggatccatggttaagtcacagggcatcttcccctgttcctgttgttcccctgttcctgcctgttgcgtcatagacgtttgcagaatgccttattttatgagactcgctttgttcttgttttgcctgatggctcttgtggagagcagaaaacccaggaggaagagatggacagggcacctggaaacatccaagccaagtcacttgtataaaaagaacctcgatgtgaccaagatccggacaggaaaacctcggcctctgctcagggtagaggaccatgacttcaccatgaggccagcctttggaggcccggccatccctgtgggtgtggacgtgcaggtggagagtctggacagcatctccgaggtggacatggacttcaccatgaccctgtacctgaggcattactggagggatgagaggctggcctttcccagcagcagcaacaggagcatgaccttcgatggcaggctggtgaagaagatctgggtccctgacgtcttctttgttcactccaaaaggtcatttacccacgacaccaccaccgacaacatcatgctgcgagtgtttcccgatggccacgtgctgtacagcatgaggattaccgtcactgccatgtgcaacatggacttcagccacttccccctggactcccagacctgctctttggagctagagagctacgcgtacacggacgaggatctgatgctgtactggaagaatggggacgagtccctgaagacggacgagaagatctccttgtcccagtttctgatccagaagttccacacgacttccagactggccttctacagcagcacgggctggtacaaccgtctgtacatcaacttcactctgcgacgtcacatcttcttcttcttgctccaaacctactttcctgccaccctcatggtcatgctgtcctgggtgtccttctggatcgaccacagagctgtgcctgctagagtttcactgggcatcatgacggtgctgaccatgtccaccatcatcacgggcgtgaacgcctccatgcctcgagtgtcctacatccgggccgtggacatctacctctgggtcagctttgtgttcgtgtttctctcagtgttggagtacgcagctgtcaactacctgaccacagtgcaggaacagaaggaacggaagcttcgggacaaatttccatgcacgtgtggaatgcttcattcaagaaccatgacgctggatggaagctacagtgaatctgaggccaacagcctggctggctacccaagaagccacattcttccagaagaagaaaggcaagacaaaatagtggttcatttggccctcaacagtgaattgacttcatccagaaagaaaggccttctcaaaggccaaatgggactctatatcttccagaacacccatgccattgacaaatactccaggttgatatttcctgccttctacatagttttcaacctaatttattggtcagtgttttcctagggattctaaggctggatctgggaaagggcatgaccatccgttggtggatacatggacctaatgaccacacttcctacaccaggccaagcagctgctcctggcttggaggagcccagggacctccagctgccctcaccccatcttcatggctcttttcctagttcacactattccagatcacacttttgact

SEQ ID NO: 225 - DNA, 2280 bp, Rattus norvegicus
ggtgcttacaaatggaaaacttccaacagctgacttactatggattgatccagtgcttgcgttggtgaatcaatctcccgaggaaaattccacagaaattccaggagcttggagtaaacaagaccccgcccagcccaggaggaagctgtagttcgagcttcattccggaacccagcgccatttcccgtactctgggtggggccgcctcctccaccgctttgccgtgagactgggcttgagaccgctgtgaggggaatggaggcttcttcgcctctggaccccgtggggcgccttgtagccttctgccgcggaggagtgcatctggccgtcctgctgctgttcttgtcgccatctactttgggccagtgcccagccccaccactgtttccttatgccaaacctataaatccaactgatgaatccacgtttcccgttggaacatctttgaagtatgaatgtcgtccaggatatatcaagaggcagttctctatcacctgcgaagtaaactcagtgtggacaagtcctcaagacgtgtgtatacgtaaacaatgtgaaactcctttagatcctcagaatggcatagtacatgtaaacacagacatccggtttggatcctctatcacttatacctgtaatgaaggataccgcctcattggttcctcctctgctatgtgcataatctctgatcagagcgttgcctgggatgccgaggcacctatttgtgaatcaattccttgtgagatacccccaagcattcccaatggagatttcttcagtcctaacagagaagattttcattatggaatggtagttacctaccagtgcaacactgatgcgagagggaagaagctctttaacctggtgggtgagccctccatacactgtaccagcatcgatggtcaagttggagtctggagtggccctcctcctcagtgcattgaactcaacaaatgtactcctccccatgttgaaaatgcagtcatagtgtctaaaaacaaaagcttgttttccttaagggatatggtggagtttagatgtcaggatggctttatgatgaaaggagacagcagtgtgtattgtcgatccctaaacagatgggagcctcagttaccaagctgcttcaaggtgaaatcctgtggtgctttcctgggtgagcttcctaatgggcatgtattcgttccacaaaatcttcaactcggggccaaagtgacctttgtttgtaatacagggtatcaattaaaaggcaattcttctagtcattgtgttcttgatggagtggaaagcatttggaatagcagcgttcctgtgtgtgaacaagtgatatgtaaactccctcaggatatgagtggattccagaaagggttgcaaatgaaaaaagattattactatggagataatgtagccttggaatgtgaggatgggtatactctagaaggcagttctcagagccagtgccagtccgatgccagctgggatcctcctctgcccaaatgtgtctctcaagtgatatgtaaactccctcaggatatgagtggattccagaaagggttgcaaatgaaaaaagattattactatggagataatgtagccttggaatgtgaggatgggtatactctagaaggcagttctcagagccagtgccagtccgatgccagctgggatcctcctctgcccaaatgtgtctctcaagtgatatgtaaactccctcaggatatgagtggattccagaaagggttgcaaatgaaaaaagattattactatggagataatgtagccttggaatgtgaggatgggtatactctagaaggcagttctcagagccagtgccagtccgatgccagctgggatcctcctctgcccaaatgtgtctctcgctcaaacagtggtctaatagctggaattttcattgggataatcgtccttattttattcatcattttttcctactggatgattatgaagtttaaaaaacgcaattccaccaatgaaaagtgtaaagaagtgggtatctatttaaattctaaagaagacagctgtgttcagcctcagtctctgctcacaagtcaggagaacaacagtaccagtagcccagcacggaattcactcactcaagaagtctaatagccgccatgtacagtgatgtctctgaaacgcaaaacatttcctgtctgtatcacttttaaaataaactattttcttttaaaatctagatgtgttgttcatacataaggaatgcaacaaactcatggccactcaggatatttaacttgtttcaaaaat

SEQ ID NO: 226 - DNA, 2573 bp, Rattus norvegicus
ccgggctcccggcccgggcctcgccatgccgccaccgcccgggcccaccgccgccctgggcactgcgcttctgctgctcctgctggcctccgagtcttcgcacactgtgctgttgcgggcgcgtgaggcggcgcagttcctgcggcccaggcagcgccgcgcctaccaagtcttcgaggaggccaagcagggccacctggaacgggagtgcgtggaggaggtgtgcagcaaggaggaggctagagaggtgttcgagaacgaccccgagacggactatttctatccaagatatcaagagtgcatgaggaaatatggccggcccgaagataaaaacccaaatttcgccacctgtgttaagaacttacctgaccaatgcaccccaaacccctgtgataagaagggcactcaactctgccaagacctcatgggcaacttcttctgcttgtgcaaagatggctggggaggccggctctgtgacaaagatgtcaacgagtgtagtcagaagaatgggggctgcagccaggtctgccataacaaaccaggaagcttccaatgtgcctgccacagtggcttctcacttcaatcagacaacaagagctgccaagatatagatgaatgcacagactcagacacctgtggggatgcgcgttgcaagaaccttccgggctcctactcctgcctctgcgacaaggggtacacttacagctccaaggagaagacctgccaagatgtggatgagtgccagcaggaccgttgtgagcagacctgtgtcaactccccaggcagctatacctgccactgtaatgggcgcgggggcctaaaactgtccccagacatggatacctgtgaggacatcttaccgtgtgtgcccttcagcatggccaagagcgtcaagtccttgtacctgggccgcatgttcagcgggacccccgtgattagactacgcttcaagaggctccagcctaccaggctgctggccgaatttgacttccgtacttttgaccctgagggagtcctcttcttcgccggaggtcgctcggatagcacctggatcgtcctgggcctcagggctgggcgacttgagttgcagctacggtacaatggcgttggacgcatcaccagcagtgggccaaccatcaaccacggcatgtggcaaacgatctctgtggaagaactggaccgcaaccttgtcatcaaggtcaacaaagatgccgtgatgaagattgcggtggctggggggctgttccagctagagagaggcctgtaccacctgaatctcactgtggggggcattcccttcaaggagagtgacctcgtccagccgattaaccctcgcctggacgggtgcatgaggagctggaactggctgaatggggaagacagtgccattcaggaaacggtcaaggccaatacaaaaatgcagtgcttctctgtgacagagaggggctccttcttcccggggaatggatttgccttctatagcctcaactacacccggacatcgctggatgtcggcacggaaaccacctgggaagtagaagtcgtggctcgcattcgccctgccactgacacgggggtgctgatggcactggtgggggacaaagacgtcgtcctcctctctgtggccctggtcgactaccactccacaaagaagctcaagaagcagctggtggtcctggcagttgagaatgttgccctggccctgatggaaatcaaggtgtgcgacagccaggaacacactgtcactgtctccctgcgggatggcgaggccaccctggaagtggatggtaccaagggccagagcgaagtgagcaccgcacagctgcaggagcgactggacctgcttaagacacgtctgcaaggctccgtgctcacctttgtggggggcctgccagatgtacaagtgacttccacacccgtcacggcgttctaccgtggatgcatgactctggaggtaaacgggaagaccctggacctggatacggcctcctacaagcacagtgacatcacctcccactcctgcccgcctgtggagcacgtcacagcctagaccgagctgcaagagttctctacacctaaaagacacggtgaagcagggtcagggacacacagcaccatctcctctcgcatgggccctgcaacactggagcaggtgcagggctacgatgggtactacgtactgtccgtggagcagtaccccgagctggctgacagtgccaacaacatccagttcctgagacaaagcgagatcggcaagaggtaacccccgggccacccctgcgcagattctcctgtagcacaaaccgaaccggactctccaaagagccttccagaatgacactgctctgcagacaccctcggcgcagacacaggcaacacaaaccagaaacaaagacgactttttttttctctaaatgaccttaaaggtgatcggctttaaagaatatgtttacatacgcatatcgctgcactcaattggactggaagtatgagaaggaaaaaaaagcattaaaaaggcaacgttttgccatgaccctctgtaccttcgaggcactgtatttaacaaaagtttt

SEQ ID NO: 227 - DNA, 846 bp, Rattus norvegicus
cgttgctgtcgggcgctggccagcgtgttgcagcggccgatgccggtgaatcagcacgggttttttggactcggaggtcgtgcagatctgctggacttgggtccggggagtcctggtgatgggctgagcctagccgcgccgagctggggtgtcccggaggagccacgaatcgaaatgcttcatggaaccaccaccctggccttcaagtttcagcatggagtcattgttgcagcggattcccgggccaccgcaggtccctacattgcttcccagacagtgaagaaagtgatagagatcaacccttaccttctgggcaccatggctgggggtgcagcggattgcagcttctgggagcggttgttggctcgacagtgtcgaatctatgagcttcgcaacaaggaacgcatctcggtcgcggcggcctccaaactgcttgccaacatggtgtatcagtacaaaggcatggggctgtccatgggcaccatgatctgtggctgggataagagaggcccgggcctctactatgtagacagtgaggggaacaggatctctggaaccgccttctcagtgggatctggctccgtgtatgcgtttggagtcatggatcgaggctactcctatgacctacaagtggaggaggcctatgacctggcccgccgagccatctaccaagccacctacagagatgcctactccggaggagcagtcaacctctaccatgtgcgggaggatggctggatccgtgtctccagtgacaatgtagctgacttacatgacaagtatacttcatctatcccctgagggaaggtggagtgccctggttataataaataatagtacccgttc

SEQ ID NO: 228 - DNA, 1640 bp, Rattus norvegicus
agagccgtgcgcagcggcgtgtgtggggccgtgtgcagacccgcgtgtggcgcaggcaaggaccctgaaaataaacagccgctgctttgcgagtctccttcttgggtctacgtccgagtctcctctgctgtgggcagctcagacgccgaagctctaactgcagctatgagcagcaacgaatgcttcaagtgtggacgatctggccactgggccagggaatgccctactggtggaggtcggggtcgtggaatgagaagccgcggcagaggtggttttacctcggatagagggttccagtttgtttcctcgtctcttcctgacatctgttatcgctgtggtgagtctggtcatcttgccaaggattgtgatcttcaggaggatgcctgctataactgcggtagaggtggccacattgccaaggactgcaaggagcccaagagagagcgagagcaatgctgctacaactgtggcaagccaggccatctggctcgtgactgtgaccacgcggacgagcagaagtgctattcctgtggggaatttggacatattcaaaaagactgcaccaaggtgaagtgctataggtgtggtgaaactggtcatgtagccatcaattgcagcaagacaagtgaagtcaactgttaccgctgtggcgagtcagggcatcttgcacgggaatgcacaattgaggctactgcctaattattttcctttgtcgcccctcctttttctgattgatggttgtattattttctctgaatcctcttcactggccaaaggttggcagatagaggctgttcccaggccagtgagctttacttgcagtgtaaaaggaggaaaggggtggaaaaaaaaccgaatttctgcatttaactacaaaaaaagtttatgtttagtttggtagaggtgttatgtataatgctttgttaaagaaccccctttccgtgccactggtgaatagggattaatgaatgggaagagttcagtcagaccagtaagcccttctgggtttgagtgtgttcccatgtaggaggtaaaaccaattctggatgcatctaagcttccatgaataactttaattcttagcataatgatggccttggattgtctgacctcagtagctattaaataacatcgagtaacatctgcatcaggccctcatagaacattcagttgagttgggagtaaactgaaaagacaaatgtgttgaaggatatgccagggaatctggctaaagcctaatacaggagcatcttcatcccagtgttgatgctggacgtacagaaggtgatggcaaaggtgtagaacacattttttcaaagactaaatctaaaacccagagtaaacatccgatgctcagagttagcataatttggagctattcaggaattgcagagaaatgcattttcacagaaatcaagatgttatttttgtatactatatcacttagacaactgtgtttcatttgctgtaatcagtttttaaagtcagatggaaaaagcaactgaagtcttagaaaatagaaaatgtaattttaaactattccaataaagctggaggaggaaggggagttttgactaaagttccttttgtttgttttaaattttcatcaatgtatatagaacaaaatgccatattaaaga

SEQ ID NO: 229 - DNA, 1786 bp, Rattus norvegicus
gaattccgactagttctcagagagttgggcatgcaaaaccaaccaccttttgtgggtaggtcctattgattcctctcgttttctttacttagtaccagctgctgtcaacatcacatcctgcatcagcacttctgggggttatgggatcatcctgacctggtcctgcccatctgggagttatgagacctttgaggtggaagtgggcaggaagtggagctcccaaaatggatctttgtgtgggaagggcatgaccgtgttagatcttgagccagctcagtcctatacagctaccgtcacgactgtctctaatagcctgaaggtccagtctgcccctgcaacctgccgcacagagagtacagccgtcattgctggagccattgtaggcatcctcctgcttttcatcctggtgggcctgcttattgtcttcctgaagaggaggagaaagaagcagcagccaaaggaagtgcccaaggatctggtgttccgcttcccaggggatatcctggccaaagactttgctgaccatgtcagggagaatgaaaaggacagcaactgtggatttgctgaggagtaccagcaattggctctggagggccaaggccagtctcagatgacagcattggctctagagaatgtatccaagaaccgctacaggaatgtgctgccctatgactggtcccgggttcccctgcagcccctccatgaggaaccaggctcagactacatcaacgccagttttatgcctggtctctggagccccaaggagttcattgcaacccagggtcccctgcctcacactgtgagtgacttctggcgaatggtgtgggaacagcagagccacaccctggtcatgctggccaactgcatggagtctggacaggtgaagtgtgagcattactggcccctggatgctcagccctgcactcatggccagctgcaggtgacgctggttagtgaggaggtgacagagaactggacagtgaggcatcttcagctcttccatatgaaagaacagcagactctctctgtgcgccaattccactacgtggcctggccagatcacggagttccttactccccagaccccttgctggctttccaaaagttgcttcggcaatggttggatcagaccatggatggaggtccgcccattgtgcattgcagtgctggtgtgggccggacgggcaccctcattgcactggatgtcctgctgcggcagctggagtgtgaggggctggtggatcccttcagctttgtgaagaagatgagagagagccggccattgatggtgcagacagaggcccagtatgtgtttctacatcagtgcatcttgagatccctccagaagccagatccagccctccctgcaaaggaggcaacctatgagaacgtggcaagcttagtttatgagaatgcatccgccatcagggcccatgagtctgaggtctcagcttctgggtgctgaacctagacaaagcaatactcaggcctggtctgggcctgtgctggagcccagatacctggacctccaagtgaactgaggattggagtcctagcctcctcaacccttgggaggaagcactgaaaacccatctctgttgtccaagggcaggaaggactgatgtacttcaacttgtgagccctgcctgagagctggaacctgagaacaggggtgacggtaggtttcctgttctttgagtggaaacagctacagcctgggtaggcaggctctcaaagaaacaggctggaacctggattcaaaagaaggaatcagggtcttgaattc

SEQ ID NO: 230 - DNA, 698 bp, Rattus norvegicus
ggaggaatccctgctccagcagctgcaaggtccaagaagaagaagaccccagcgaggaaaatgtgctggagacccctgtgccggttcctgtggctttggtcctatctgtcctatgttcaagctgtgcctatccacaaagtccaggatgacaccaaaaccctcatcaagaccattgtcaccaggatcaatgacatttcacacacgcagtcggtatccgccaggcagagggtcaccggtttggacttcattcccgggcttcaccccattctgagtttgtccaagatggaccagaccctggcagtctatcaacagatcctcaccagcttgccttcccaaaacgtgctgcagatagctcatgacctggagaacctgcgagacctcctccatctgctggccttctccaagagctgctccctgccgcagacccgtggcctgcagaagccagagagcctggatggcgtcctggaagcctcgctctactccacagaggtggtggctctgagcaggctgcagggctctctgcaggacattcttcaacagttggaccttagccctgaatgctgaagtttccaagaccaccgggctcccgaggatcatgttgagggaagaaaccttggctcccaggtatcctcaggagaagagagccatgtgttcacacccctcatccaggaccctgtccgtttctcctactcctctag

SEQ ID NO: 231 - DNA, 1603 bp, Rattus norvegicus
gaattcggcacggctcggtcatccgcacgccgcacctggatgcgctggcggccggcggcgtggtcctggacaactactacgtgcagccgctgtgcacgccctcgcggagccagctgctcaccggccgctatcagatccatatgggcttacagcattacctcatcatgacctgtcagcccaactgtgttccgctagacgaaaaactcctgccccagcttttaaaggacgcaggctcaagtacgcatatggtcggaaaatggcacctgggaatgtaccggaaggaatgcctgccaacccgcagaggattcgatacgtacttcggatacctcctaggcagtgaagactactacacccacgaggcctgtgcaccgattgagtgtctgaacggtacccgctgtgcgcttgatctccgagatggcgaagaacctgcaaaagagtatacagatatttactcaacaaacatatttaccaaaagggctacaaccctcatagctaaccacccccccgagaaaccactgttcctctaccttgctttccagtctgtccacgatcccctgcaggtccccgaggagtacatggagccatatgacttcatccaagacaagcacagacgtatttatgcagggatggtgtccctcctggacgaagcagtggggaatgtcaccaaagccttgaaaagccgagggctctggaacaacacggtcctcatcttctccacagacaacggcgggcagactaggtctggaggcaacaactggccacttcgaggaaggaaagggaccctgtgggaaggtggcatccgaggagcaggtttcgtggcaagccccttgctgaaacagaaaggtgtgaagagccgggagctcatgcacatcaccgattggcttccaacgctggtgaatctggctgggggaagcacccatggaaccaaacctctggatggcttcgacgtgtgggaaacaatcagtgaaggaagcccatccccaagagtggagctgctacttaacatcgatccagactttttcgatggcttaccatgtcctggcaagaacacgactccagaaaagaacgattcttttcctttagaacattctgcctttaacacatctatccatgctgggatcagatacaaaaactggaaactcctcacgggctacccaggctgtggttactggttcccgccaccgtctcagtccaacatctctgaggtaccttcagtggactcaccaaccaagactctctggctctttgacatcaatcgggaccctgaagaaagacatgacgtgtcccgggaacatccccacatcgtccagaaccttctttcccgcctacagtactaccatgaacattctgtgccttcttacttcccacctttggacccccgctgtgatcccaagggtaccggtgtatggagcccctggatgtagggctcaggggaggtggggctggagtacatttctgtgcaggctagcctcaggcccatactctcctggcttctccatcatcccccaccctgtcacctggccctcacgctgtataacccactgagggagtccaatttcaacccacagtacatttttaaagccagtaaaatctggaaggatcc

SEQ ID NO: 232 - DNA, 2142 bp, Rattus norvegicus
gcgttgtcagagcagcagacggagtctgagcgtcgcgtcggtggcaggactcctgaatatatttcaaaactgaaccatttcaacccaactgaagtattctgccttcttagcggtaccagtccggtttaggagagccaagccgactatcagccatcatggcgaaccttggctactggctgctggccctctttgtgactacatgtactgatgttggcctctgcaaaaagcggccaaagcctggagggtggaacactggtggaagccggtaccctgggcagggaagccctggaggcaaccgttacccacctcagagtggtggtacctgggggcagccccatggtggtggctggggacaacctcatggtggtggctggggacaacctcatggtggtggctggggtcagccccatggcgggggctggagtcaaggagggggtacccataatcagtggaacaagcccagcaagccaaaaaccaacctcaagcatgtggcaggggctgccgcagctggggcagtagtggggggccttggtggctacatgttggggagtgccatgagcaggcccatgctccattttggcaacgactgggaggaccgctactaccgagaaaacatgtaccgttaccctaaccaagtgtactacaggccggtggatcagtacagcaaccagaacaacttcgtgcacgactgtgtcaatatcaccatcaagcagcatacagtcaccaccaccaccaagggggagaacttcacggagaccgacgtgaagatgatggagcgtgtggtggagcagatgtgcgtcacccagtatcagaaggagtcccaggcctattacgacgggagaagatctagcgccgtgcttttctcctcccctcctgtgatcctcctcatctccttcctcatcttcctgatcgtgggatgaggaggccttcctgcttgttccttctcattctcgtggtctaggctgggggaggggttacccacctgtagctctttcaattgaggtggtgtctcattcttgcttctctttgtcccccataggctaatacccttggcagtgatgggtctggggaaatgtacagtagaccagatgctattcgcttcagcgtcctttgattgagtccatcatgggccagggttaacaccaggccagtaagaatataacaccaaataactgctggctagtcagggctttgttttggtctactgagtaaatactgtgtaacccctgaattgtacccagaggacatggtgacagagacacacataacttagtataggcaaagggttctatagccaaagaagccactgtgtgggcatggcaccctggataacagcctcccgcctgggatatctagagcatccacatgtggaattctttcttttctaacataaaccatagctgattgaaggcaacaagaaaaagaatcaaattatcctactgacattgaaagcaaactgtgttcattccctaggcgctggaatgatttttagccttggattaaaccaggagattttgactctgaggagaaccagcagtacaaaagcatggtctcctgtgatgggagagatggtgaagggacaaaggcaagacccctgcgtttcttcatttctgtctcataattatcaagagctagaattaggtcgtgccctaagtttctgtactcgtatttgaactggacaacaaagagacaatctacaaattctcttgggctgcagaggagagaaataggctccattccaaagtggaaagagaaattctgctagcattgtctaagtaaggctaacttttccttaaatcgctttgtatttcccccagcagacatcacaaccctgtgatcggttcagcctgcaccgcgggtgttctgtgtagaatatataaatataacttcaagcttaggccttctattttaaaacatctgaagtgtggaacgcactggccgttctgtgcagtactaagtgtgacccttgggctttcaatgtgcactcggttccgtatgattccaaagtagagccctagctggtcttcgaatctgcatgtacttcacgttttctatatttgtaacttcgcatgtatttgttttgtcatataaaaagtttataaatgtttgctatctgactgacattaaatagaagctatgatg

SEQ ID NO: 233 - DNA, 838 bp, Rattus norvegicus
gggacccaggggacccttggcactgcgcaggaccccgcgggacccggaaccttccgacagggttatggcggccgctccgggcgcccgactcctgcgcgctgcctgcgcctccgtcgcttttcgtggtctggactgccgtcggctgctggtctgcgggacccgtgcgggacctgccgtccctcagtggaccccgagcccccacacgcttgcagaggccggacctggccggccactgagcgtgtctgcgcgcgcgcggagtagctcagaagataaggtaacagtccacttcaagaaccgagatggtgaaacgctaacgaccaaggggaaagttggtgactctctgctagatgttgtgattgagaataacctagatatcgatggatttggtgcgtgtgaggggactttggcttgctctacctgtcatcttatctttgaggaccatatatatgagaagttagatgccattactgatgaagagaacgacatgcttgacctggcttttggactaacaaacaggtcacggctgggctgtcaagtttgtctgaccaaggctatggacaatatgactgtccgtgtgcctgaagcagtggcagatgtccgacagtctgttgacatgagcaagaattcctaagctacaataaaaagaatattttcattaaatttttacctatttttataattatttcttagcataattgattatatggccaaaatatgtagctgtgctgtcttagttcagttttgtagtactgaaaatttgcagtttttattttgattaaattattaaaatatcagtctattagaagacagctgatacaataaactccttatgtatttt

SEQ ID NO: 234 - DNA, 1403 bp, Rattus norvegicus
gggcttgcggcttctaaaatgccggattacctaggtgcagaccagcggaaaaccaaagaggatgagaaggacgacaagcccatccgagctctggatgaaggggatatcgccttgttgaaaacttatggccagagtacttattcgaggcagatcaagcaggttgaagatgacattcagcaacttcttaaaaaaattaatgagctcactggtatcaaagagtccgacactgggctggcccctccagccctctgggatttggctgcagacaaacagacacttcagagtgaacagccgctacaggttgcaagatgtaccaagataatcaacgccgattcagaggacccgaaatacatcatcaacgtgaagcagtttgccaagttcgtggtggatctcagtgatcaggtggcacctactgacattgaggaagggatgagagtcggcgtggacagaaataaataccaaattcacattccactgcctcctaagattgacccaacagttaccatgatgcaggtggaggaaaaacctgatgtcacatacagtgacgttggtggctgtaaggaacagattgagaaattgcgggaagtggttgaaacccctctactccatccagagaggtttgttaaccttggaatcgagcctccgaagggtgtgttgttatttgggccaccaggcacaggcaagaccctctgtgccagggcagtggccaatcggactgatgcttgcttcatcccagttatcgggtctgagcttgtacagaagtacgtcggtgagggggctcgaatggttcgggagctttttgaaatggccaggacaaaaaaagcctgccttattttctttgatgaaattgatgccattggaggggctcggtttgacgatggcgctgggggtgacaatgaggtgcagaggaccatgttggagctcatcaatcagctggatggctttgatcctcggggcaacatcaaagtgctcatggccactaaccgacctgatactctggacccagcgctgatgaggccagggaggctggacagaaagattgagttcagcttacctgacttagagggtcgaacgcacatctttaagattcatgctcgctcaatgagtgtggaaagagacatccgatttgagctactagcccgcctgtgtccaaacagtactggagcggagattagaagcgtttgcacagaggctggtatgtttgcaatccgagcccggagaaagattgctacagagaaggacttcttagaagctgtaaataaggtcatcaagtcgtatgccaaatttagtgctactccccgctacatgacatacaactgagccacagaggctttgactgaaggaacttcctgtgcgttcataacttgttaccgcctcacaaaaataaaagacttaaaaactgt

SEQ ID NO: 235 - DNA, 1376 bp, Rattus norvegicus
ggcttggtcactatggaggagataggcattttggtggagaaaattcaggatgagatcccagcactgtccgtgtctcggccgcagaccggcctgtcctttctgggacccgaacctgaggacctggaggacctatacagccgctacaagaagctacagcaagagctggagttcctggaggtgcaggaggagtatatcaaggatgagcagaagaacctgaagaaggagttcctccatgcgcaggaggaggtaaagcgaatccagagcattccgttggtcattggtcagtttttggaagctgtggatcagaacacagccattgtgggctctaccacaggctctaactactatgtgcgcatcctgagtaccattgatcgggagctgctcaaacccaatgcctcagtggccctgcacaagcacagcaacgcactggtggatgtgctgcctcccgaggccgacagcagcatcatgatgctcacctcagaccagaagcccgacgtgatgtacgccgatattggaggcatggacatccagaagcaggaggtgcgggaggctgtggaactaccactgacgcacttcgagctctacaagcagattggcatcgatcctccccgaggtgtcctcatgtatggcccacctggctgtggaaagaccatgttagcgaaggctgtggcacatcacacgacagctgcatttatccgtgtggtgggctcagagtttgttcagaagtacctgggtgagggcccccgaatggtccgggatgtgttccgcctggccaaggagaatgcacctgccatcatcttcatagatgaaattgatgccattgccaccaagagattcgatgcccagacaggagctgacagggaggttcagaggatcctgctggagctactgaatcaaatggatggatttgaccaaaacgtcaatgtgaaggtaatcatggccacaaacagagcagacaccttggatccagctctacttcggccaggacgcctggaccgcaaaattgaattcccactccctgatcgtcgccagaagaggttgattttctccaccatcaccagcaagatgaacctttctgaggaggtcgacctagaagactatgtggcccgcccagataagatttcaggagccgatatcaactccatctgtcaggagagtggaatgttggctgtccgtgagaaccgctacattgtcctggccaaggacttcgagaaagcatacaagaccgtgatcaagaaagatgagcaggaacatgagttttacaagtgacccctccccacactccccaggcacctgtcccaaaggctagttttctctttacccaggattggtttcgtcaataaatggacgtgattggaaaaaaagcggccgcgaat

SEQ ID NO: 236 - DNA, 1556 bp, Rattus norvegicus
acgactgaaggagagatgggtcaaagtcagagtggtggccatggtcctgggggtggcaagaaggatgacaaggacaagaaaaagaaatatgaacctcctgtcccaactagagtggggaaaaagaagaagaaaaccaagggaccagatgctgccagcaaactgccactggtaacacctcacacccagtgccgcctgaaattactaaagctggagagaataaaagactatcttctcatggaggaagaattcattagaaatcaggaacagatgaaaccactagaagaaaagcaagaggaggaaagatcaaaggtggatgatcttaggggaaccccgatgtctgtaggaaccttggaagagatcatcgatgataatcacgccattgtgtccacatcggtgggctcagaacactacgtcagcatcctgtcatttgtagacaaggatctgctggaaccgggctgttcagtcctgctcaaccacaaggtgcatgctgtgataggggtgctcatggatgacacggatcccctggtcacagtgatgaaggtggaaaaggccccccaggaaacctatgcagatattgggggactggacaaccagatccaggaaattaaggaatctgtggagctccctcttacccaccctgagtattatgaggagatggggataaaaccacctaagggggtcattctctacggcccgccaggaacaggtaaaactctattggccaaagcagtagcgaaccagacttcagcgactttcttgcgagtggttggctcagagcttattcagaagtacctaggtgacgggcccaagctggtccgggagctcttccgggtcgctgaggaacacgcaccgtccattgtgttcattgatgaaatcgacgccattgggaccaaaagatatgattcaaactctggaggtgagcgggaaatccagcggacaatgttggaactgttgaaccagttggatggatttgattcgaggggagatgtaaaagttatcatggccacaaaccgaatagaaactttggatccagcacttatcagaccaggccgcattgacagaaagatcgagttccccctgcctgatgaaaagaccaagaagcgcatcttccagatccacacaagcaggatgacgctggctgatgatgtaaccttggatgacttgatcatggcaaaggatgacctctctggggctgacatcaaggcaatctgcacagaggctggcttgatggctctgcgggaacgcaggatgaaagtgacaaacgaagacttcaagaaatctaaggagaacgttctgtataaaaaacaagaaggcacccctgaggggctgtatctctagtgacacagttgtcttcagggaacttaatgagtttcccccacctgggaagatgggaagctgccccaaggaatccatcttccagttaagttttgctagtagaaagcccgtgtcgtggaggacgctgtgtggtctgtctccaatctgttgttggtcattgtgccctgcagctctccgctcccaataaaggattgtcctggtttgctttctaaaaaaacaag

SEQ ID NO: 237 - DNA, 3169 bp, Rattus norvegicus
cggctccagtctccctcgccatggcgcttgctgtattgcatgtcctagaacccttcccgactgagacaccaccgttggcggtgctgttgccgcccgggggcccgtggccagtgaccggggtaggcctggtgctggcgctacggccggcgagcgaaagtcctgcgggacccgcgctgctcgtggcggccgtggaagggtccggcgcccaatgcgagcagcgagggcccgggcctccgccgctgctggtgagccgcacgctgctgcgggtcctagcgctgagccccggagcgagagtgcgagcgcggcctgtgcggcggcctccagccttgggctgggcgctgcttggcacgtctccgggtcctgggcttgggcctcgagtcgggccgctgctggtgcgtcgcggggagacactaccggtgcccggttctcgagtgttggagacgcgaccggccttgcaagggttgctgggcccggggacacggctagctgtaactgagctccaggggcggaccaaactggacccggagagtagggaccacaaccatcccccacccccgcccgtagtttcctcctttgcagtttcccactcaatccggcagctccgaggagttctgggagggactggagatgcactaggtgtgagccggagctgtctccggagtctcgggctcttccagggcgaatgggtatgggtggcccgagtcggagagttaccaaacacctcccagccgcacttggctcaagtacaggttctagagcctcgctgggacctgtccgcgagactgggacccaactctgggcagccgggagagccactcgcggacggactggtgtttgtgcctgccactctagcttttaatctcggctgtgaccccctggaagtgggagagctcagaattcagaggtatctggaagactctactgctgctgaggacaaaggaagctgctcactactgcctgggcctccgtttgctcgagagttacacatcgaagttctgccctcgcctcactgtggtgtcaatgggaaatatgaccatgttctctaccagcacttccacacgcccagggtggtccaggaaggggatgttctgtgtgtgtcaacggctgggcaagttgagatcctggaaggaagcctggagagactgcccaggtggcgggaggtgtttttcaaagtgaagaaaacggttggagaagccccagatgggccagccagtgccttcctggccgataccacacacacctctttatacctggctggtaccaccctgagtcgtgtccccccgctgccttcaggaaggtccccaccctgggacagcttgtctcctccaggcctggaggccttggtaaatgagctgtgtgctgtcctgaagcctcatctgcagcccggaggaacactgctcacaggaaccagctgtgtgctcctgcagggtcccccaggcagcgggaagaccaccgcggtcacagctgcatgcagtcgcctcgggctccatctgctgaaggtgccttgctccagcctctgtgcagatagcagtaggactgtggagacaaagctgcagaccaccttctcccgggcccgccgctgcaggcctgtggtcctcctgctgacagccctggaccttctgggccgggaccgagatgggctgggtgaggatgcccgcgttgtggccacactgcgtcacctcctcctcgatgaggaccctctgagcaggtgccctcctctcatggtggtggccactacaagccgtgtccaggacctgcccaccgatgtgcggacggcatttcctcatgagctggaggtgccagtgttgtctgagagtcagcggctcagtgtcctgcaggccctcactgcccatcttcccttgggccaggaggttaacctgtcacagctggcacggcgctgtgcgggctttgtggtaggggacctctatgcccttctgacccatgccagccgggcagcctgcaccaggatcaaagctgcaggcttggcgatgagtgaggaggatgagggggagctgtgtgccgctggctttcccctgttggccgaggacttcgggcaggcgttagatcaactacaaacggctcactcccaagcagtaggagcgcccaagatcccttcagtgtcctggcacgatgtgggtgggctgcaggatgtgaagaaggagatcctggagaccatccaactgcctctggaacaccctgagctgctaagcctgggcctaagacgatcaggccttctgctccatgggcccccaggcactggcaagaccctgctggccaaggcggtagccactgagtgcagcctcacctttctcagtgtaaaggggccagaactcatcaacatgtatgtgggccaaagtgaggagaatgttcgggaagtgtttgccagggccagggctgctgccccgtgcatcatcttctttgatgaactggactccttagctccgagccgtggacggagtggagactctggaggtgtgatggacagagttgtgtctcagctcttagctgagctggacgggcttcacagcactcaggatgtgtttgtgatcggagccaccaacagaccagacctcctggatcctgcccttctgcggcctggcagatttgacaagctggtgtttgtaggagcaagtgaggaccgggcctcccagctgcgcgttctgagcgccatcacacgaaagttcaagctggaggcctctgtgagcctgatgaatgtgctggattgctgcccgcctcagctgaccggcgcagacctctattctctctgctctgacgccatgatgaccgccctcaaacgcagggtccgagacctagaggaagggctggagcctcggagctcagcactgttgctcaccatggaggacctgttgcaggccgcagcccggctgcagccctcagtcagcgagcaggagctgctgcgatacaagcgtatccaacgcaagtttgctgcctgctaggagcttcctgccgcctgcaaaagcccacctggctggaggtagctgccacctgccacctgaaggctgcctccctccaggagataccctgagatccctagtgggaggcccttgtgcccaggagaagaggcagggctggcagcttgggggcgtggcagcctggaatgggcattgaggccccagttctcagacagaaaataaagtctatactgccc

SEQ ID NO: 238 - DNA, 1786 bp, Rattus norvegicus
cggcgggttgctcttctcagccatggctcctcgctgctggcgctggtggagctggtccgcgtggcctggggttcggccgcttccctccaggagcactccgacccctggcttctgcaagaagttctccacacaggagacaacccctcagatctgtgtggtcggcagtggcccagctggcttctacacagcccaacacttgttgaagcaccacacccgggcccacgtagacatctatgagaagcagctcgtccccttcggcctggtgcgctttggtgtggcacctgaccatcctgaagtaaagaatgtcatcaacacatttacacagacagcccgctcagaccgctgtgccttccggggcaatgtggtggtgggcagggacgtgtccgttccagagcttcgggaagcctaccatgctgtggttctgagttatggagccgaggaccaccaacccctggaaattcctggcgaggagctgcctggagtggtctcagcccgggcctttgtgggctggtacaatgggcttcctgagaaccagaagctggctccggatctgagctgtgacacggctgtgattctggggcaagggaatgtggctctggatgtggcccggatcctgctgaccccacctgagcacctggagaaaacagacatcacagaggttgcactgggggtcctgaggcagagtcgggtgaagactgtgtggatagtgggtcggcgtggacccctgcaagtagccttcaccattaaggagcttcgggagatgattcagttgccaggaacccagcccattttggatccttcggatttcttgggcctccaggacagaattaaggatgtcccccgtccaaggaaacggctgacagagctgctgcttcggacagccacggagaagccaggagtggaagaggctgcccgccgggcactggcctctcgggcctggggcctccgctttttccgaagcccccagcaggtgctacccaccccagatggtcgacgggtagcaggcatccgcctggcagttaccagactggagggtgttggtgagtccacacgggcagtgcccacgggagatgtggaggacctcccttgtgggctgctgctgagcagtgttgggtataagagccgtcccatcgaccccagcgtgccctttgaccccaagcttggaatcatccccaacacagagggccgggttgtgaatgcaccaggcctctactgcagtggctgggtgaagaggggacccacaggtgtcatcaccacaaccatgacagacagcttcctcaccagccaggtgctgctgaaggacctgaaggccgggctgctgccctctggccccagacctggctatacagccattcaagccctgctcagtgatcgaggggtccggccagtctctttctcagattgggagaagttggatgctgaggaagtagctcgaggccagggcactgggaaaccaagggagaagctggtggatcgaagagagatgctgcagctgctggggcactgaacctgggccccagaccccaccgtacaagaagagctgtgctgggttggcagttgggttacagtgctgactgtcctggcttggaggccgacctgtggcctttccagggccctctgagctctgcctcagttaacctcccagtgtgggtttaggcccaggagggaacctgagctagggatggatggaggtacggacagaccctacccatcttgtttccttcctgtcggacgatggtaggcctctagactggaacacagtggaaataaaacagacgtgcctaag

SEQ ID NO: 239 - DNA, 3775 bp, Rattus norvegicus
ggtccccagcggcagtggcagctctgacagcggcccgtgcgctgtgtctccaccgtgccctgcatccctcatcccacatccgccgcgctccccgattcctcacaaacgccggtgcccatcatggggaagcccacgagctcgggatgcgactggcgccgcttcctgcggaatcactggctgctgctctccaccgtggccgccgtggtactgggcatcgtggtaggagtcttggttcgaggacacagtgagctctcgaatctggataaattctactttgcgtttcctggagaaattctgatgcggatgctgaagctcgtaattatgccactgattatatccagcatgatcacaggtgtcgctgcactggattccaacgtatctgggaaaattggtctttgtgctgtagtatattatttctccaccaccgtcattgctgtaatcctaggtattgtgttagttgtgagcatcaagcctggtgtcactcagaaagtgaatgaaatcaacaggacaggcaaaacccctgaagtcagcactgtggacgccatgttggatctgatcaggaacatgttccctgagaacctggtccaagcctgttttcagcagtacaaaaccaagcgtgaagaagtgaagcctgccagtgatcctggggggaaccagacagaggtgtctgtcaccacggccatgacaacaatgtctgagaacaagacaaaggaatacaaaatcgtgggcctgtactcagacggcatcaacgtcctgggcctgattatcttctgcctcgtctttggacttgtcattggaaaaatgggagaaaaagggcagattctggtggatttcttcaatgcgttgagtgacgccaccatgaaaatcgttcagatcatcatgtgttacatgccgatcggtattttgttcctaatcgctgggaagatcatagaagttgaagactgggaaatattccgcaagttgggcctttatatggccactgtcctgagtgggcttgcaatccactccctcgtagtgctgccactgatctatttcatagtcgtgcggaagaaccctttccgctttgccttgggcatggcgcaggctctcctgacagctctcatgatctcatctagctcggcaacccttccagttacattccgctgtgcggaagaaaagaaccacgtggacaagaggatcacaagatttgtgctgcccgtcggcgccaccatcaacatggacggcactgcgctctatgaagccgtggcagctgtgttcattgcgcaagtgaacggcatggacctgagcattgggcagatcatcacgatcagcatcacagccaccgctgctagcattggagctgccggtgtgccccaggctggcctggtgaccatggtgatcgtgttgagtgccgtggggctgcctgctgaggacgtcaccctcatcattgccgtcgactggctcctggaccggttcaggaccatggtgaacgttctgggtgatgcgtttgggacgggcatcgtggagaagctgtccaagaaggagctggagcaggtggatgtctcctctgaagtcaacattgtgaacccctttgccttggagcccacaatcctggataatgaagactcagatacgaagaagtcttacgtcaatgggggcttctcggtagacaaatctgacaccatctcgttcactcagacctcgcagttctagatgcctggccttagatgcctgggactgtgaagggcatctccgagggagccatctcttagccaactccagcgttaaggagcgagaaggacacaaagaatcaactgtacatttagtttgataaacagacctccagattattttctatatttggctctatagcctttgttctctgggtttgggaacgtggggtgggatgaaccgaaggaaattaagaaagctgtgttatctggactttctaattctgtaaaacaaagtttagaagtatatgacgtagtaactgttaggattaggtcatgggtctgggagaaaaattgctttctcaagcacagaccaatatttggggtttttaaacaatattattggctacaaatttttactcaggctttctattggcggggcttcctttgccttctcactttttatagattataattcagctcaaaagccccacccagtcaactagtgcccaattttccattttgcctcattccagcactctcaactactagtgccaaattttccattttgacctcatctccagcaactctcaaactacttttgggaaaaaaaaaaaagcaaaaaggatcagcatagtctgcaataacagtttcaagatattgtggggcttaggggaagggaagggttttttattcaatgtactgtattgggacgctggatgtcagtgttcggtatagaactatatgtatatgtgtgtatatttattattttcatgtaattttcaagacagagatcagtaatgaactatcaatgtgaacgagacgttttccttgtacttgaatcagggctctagctccagccttgctgtgcttcagagctcacgaggacgctctcaggcgctctggggtgagaaatcaagttgctgggttactgtggttcaagccctaaagcagaaactctagggtggcccagccatccattgacaacatctaaggtcaagctccctggagggtgggaaacccttgtcgggcatggaataagtacatttacaaagggaccgtagaggcaagatgtgctccgatagcaacagaaggcttcattcttcaagtacacttcaaggcccacttcacaaggctgtcacctttctgcccttggttttctctgaccaccagggccaaaccagcagtggcgagccatcacctaagctgtttcaaaatgggctgcataaattgaataagcttcatcggaaggtgaccaagctattctaatactgtagtctttttattttagcttttgttattttatttttttagttttttgagacagagtttgtctacatagccctggctatcctggaactcactatgtagactagactggcctcaaactcacagagatcctcctgcctctgcctccttagtgctggcctgaaaggcaagtgccaccatgcccagctctatgctgaattcttacagaataaaaaccataaaagccgggccacaagctactgataccagtggttcaggggaaatgcttcagtctgtctctggagaagactgttctgaaaatctcggccttgtggcttagaatcctctgcctgtctttctcctgctaatttctgaagatggactattaaaattctacacttctgtccccatcctgtaaataaaacccaacaaaaactcgttcttaatgtggacggattcagaacagccatgtttctgtagtgcccttaactcatcttaaacccgtgcttttatatttgagaagccagaaatcgtgccaaagataacagaaaggtaaacgagtgttgaccatggccacctgaagctacagcctgaccctcacagtgaccagtgactccgaactttgaagtacaaatatccctattctttataggaagcaaatctaaatctaaatgaggttggatgaatactttatgtaggaatggctggttctgtccccttatcaggtggttcttgtctgtggcactgaattaattggcagagctgtccacgagttcactggggtcatccttgtaaccagctgcttaacacactgtgctgttatctcaagaggacgcgttccatttttctcaataaacatctcccacactttctccctt

SEQ ID NO: 240 - DNA, 3137 bp, Rattus norvegicus
gtggcggcggtcgtggtggcgacgacggcggccggagtgggctggtatccccctgctgagcatggtagcagcctgtggtctcagttatcccatctggtgtcaggcacaccttgaagagccagcaagcttgggcacctacagcccagctaatgacggagtgacccacctaccccagcttggccatctgatgggggacacaagccaaatgatttgagaaaacaccagggacatcatcatcgcacaggtgactaaatggtggactctgtgacaagtggctttcagtaatggccagctaggcatgtgcggcccctgaggtcgcctttgacttctggaagtagaggtctgcaagcctaccacacaggccacaccagcccatggggcccctggagcccccgggagccacctgactgtccagacccccccaccccccgggcccagccatggcaggtgctgaaggcttccagtacagggctgtatacccattccgccgggagcggcctgaggacctggagcttcttcctggtgacctcctggtggtgagccgggtggctctgcaggcactaggtgtggctgatggaggagagcgctgcccacacaacgtgggctggatgcctggcttcaatgagcgcacccgacagcgaggggacttccctggaacatatgtggagttcctaggacctgtggctctggctcgaccaggccctcgcccacgggggccccgtccgttgcctgccaggcccttggatggaccttctgagtcaggtcacacactggcaagcctggcagagcagttctccccacctgagcctgcgcccccgattctggtgaagctgatagaagccattgagcaagcagagctggacagtgaatgctacagtaggccggagctgcccgcaccacggacagactggtccctgagtgacttggagcagtgggaccgcaccaccttgtacgatgctgttaagggcttcctgctggcattgcctgcagctgtggtgactcctgaggctgcatcggaggcttatcgggcgatgcgggaggttacggggcctgtggggctggtgctggaacccccaacgctgccgttgcaccaggccctcactctgcagttcctgctgcagcacctgggccgcgtggcccgcagagcaccctcaccagctacagctgtccacgcactggccagtgccttcgggccgctgctgctgcgtgcgcctccgccagggggcgagggtgatgggagtgagcctgcacctgacttccctgtgctgcttctagagaggctggtgcaggagcatgtggatgagcaagacaccgccccgccagcactgccacccaaaccctctaaggtaaagccggcacccacagccctggccaatggagggagtacaccctcgcttcaggatgcagagtggtactggggggacatttccagggaagaggtgaatgagaggctccgagacacacctgatggtaccttcttagtccgagatgcatccagcaagatccaaggagagtacacgctcaccctcaggaaaggcgggaacaacaagctaatcaaagtcttccaccgggacggtcactatggcttctcagagccccttaccttctgctccgtggtagagctcatctcccactaccgacatgagtcactggcccagtacaacgccaagctggacacgcgccttctctaccctgtgtccaagtaccagcaagaccaggtggtgaaggaggacagtgtagaggctgtgggtgcccagctcaaggtctaccaccagcagtaccaggacaagagccgcgagtatgaccagctctatgaggaatacacacgaacctcccaggagcttcagatgaagcgcacagccatagaggccttcaacgagaccatcaagatcttcgaagaacagggccagacacaggaaaagtgcagcaaggagtatttggagcgcttccggcgagagggcaatgagaaggagatgcagaggatcctgctgaactcggagcgactcaagtctcgaatcgcggagatacatgaaagccgcacgaagctggagcaggatctgcgggcgcaggcctcggacaatcgagagattgacaagcgcatgaacagcctcaagcctgatctcatgcagctgcgcaagatcagggaccagtacctcgtgtggctcacccagaaaggtgcccgacagaggaagatcaacgagtggctgggaatcaagaatgagactgaggaccagtattcactgatggaggatgaggacgccctcccccaccatgaggagcgcacgtggtacgtgggcaagatcaaccgcacacaggcggaggagatgctgagtggcaaacgagacgggaccttcctcatccgggagagcagccagcggggctgttacgcatgctctgtggtggtggatggcgacacgaagcactgtgtcatctaccgcacagccactggctttggcttcgcagagccctataacctgtacggatccctgaaggagctggtattgcactaccagcacgcatcacttgtgcagcacaatgacgcgctcaccgtcaccctcgcacaccctgtgcgtgcccccgggcctggcccgccccctgcagcacgctgagcgccccacctcacctgcctccctgtccatgtctgtcttctaatcccttcccctggtgaacacacgcaggatgccatcctcccgctgcgtctgccatgtttacagaggctgcggggccactggcctgggccccccgagttcttcaagccatatctccgatttagaaaggaactgtgctaggtggtttccaggaactcagccctggacacttggggctgggcgggacccgccccgtggaccccaacttcccctcttaaggtcgaagtgaaaccagtcacggggttaccccgcagctgccgagaagctccccctctggagggcaaaatacaaactagccctcgtccaggccctgcgctgttctcctgactgtgcaatgcctcccctttgggacaagggccctgagtgtgtccctgctccctgaaccccatacctgcccagggttgatgggcagcaggttttgtacggtacgtttattgatacgaatatgaaacattgtacctgtaaaaaaaaaaaaaaaaaaaaaaaaaa

SEQ ID NO: 241 - DNA, 3565 bp, Rattus norvegicus
cacgagctcgttcccctcgcagcctcagctaagacccggagaggtggaatttcgatttgaaactccctagccagggccggggctgggcatgctcagtgcctcggtgtatcgggctgctgctagctgcacaggcagcagaggcgctgcctggcttggaagctggcacaagagtccaccccactgtcaccaccgactgcgggcttcaggaaggccaaacactcacctcctctgagcgctttacacccaccaacctcgagtccccatctcccgcagcatcctactctcccgtctccccatcccttagggagacgaagccagtgctcggttctgtaggcacgccacagactgctctgtgaaccccagcggaggaccctgtcatcggatgcctcgggatcaaaggactcttggcagtgtttctctcaaatagcactttgcctggagtgggattgcggtggagtttctcccccgcccctcaatgcacacactatgaggagagcggtcggtttccctgcactgtgcctgcttcttaatcttcacgctgcagggtgtttttccaggaacaatgaccactttttggctattcgtcaaaagaagagttggaaacccatgttcatttatgaccattcccaagacattaagaagagcctggatatcgctcaagaggcatataaacacaactaccccgccccctcagaagttcaaataagcaaacgtcaccagatcgttgattcagcatttcctagacctgcatatgacccatctcttaatctgttggctgcatctggtcaagacctcgaaatagaaaatctcccaattccagcagcaaatgtgattgtggtgacactgcaaatggatatagacaagctgaacataaccttgcttcggatcttccgccaaggagtagctgcagccctgggactcttacctcagcaagtacacatcaaccgcctcattgaaaagaagagccagattgagttgtttgtgtctcccggaaaccggaaaccaggagagccgcaggccctgcaggctgaggaagtactgcgttcccttaatgtggatgttttgcgtcagagtttaccacagtttggaagtatagacgtctcccctgagaaaaatgttttacaagggcagcatgaagcggacaagatctggagcaaagaaggcttttacgccgtcgtcatcttcctcagcatctttatcattatagtaacctgtttgatgatcatttataggttaaaagaaaggcttcagctttccttccgacaagataaagagaaaaaccaggagatccacctatcgcccattgcactccagcaagcacaatcggaggccaaggcagcccacagcatggtccagcccgaccaggcgccaaaggtgctgaatgttgttgtggaccctcaaggccaatgcactcctgagattcgaaacaccgcctccacttctgtctgcccttctcccttcaggatgaagcccataggactccaggagcgacgaggttccaatgtatctcttacactggacatgagtagcctgggcaacgtggaaccctttgtggccgtctccaccccccgggagaaggtagccatggagtacctgcagtcagccagccgagttctcacaagtccacagctgagggacgtcgtggcaagttcccacctgcttcaaagtgaattcatggaaataccaatgaactttgtggatcccaaagaaattgatattccacgtcatggaactaaaaatcgttataagaccattttgccaaatcccctcagcagggtgtgcttaagaccaaaaaatataactgacccattgagtacttacatcaatgctaattacattcggggctacagtggcaaggagaaagccttcattgccacacagggccccatgatcaacactgtgaatgacttctggcagatggtttggcaagaagacagtcctgtgattgttatgatcacgaaactcaaagagaaaaatgagaaatgtgtgctctactggccagaaaagagagggatttacggcaaggttgaggttctggtcatcggtgtcaatgaatgtgataactacaccatccgcaacctcgtcttgaagcgaggaagtcacacccaacatgtgaagcattactggtacacttcatggcccgatcacaagactccagacagtgcccagccccttctgcagctcatgctggacgtagaggaagacagactggcctctgaaggccgagggcctgtggttgtccactgcagtgcagggattgggagaaccggatgtttcatcgctacatccattggctgtcaacagttgaaagaagaaggagtcgtagatgcactaagtatcgtctgccagcttcgtgtagacaggggtggaatggtccaaaccagtgagcagtatgaatttgtgcaccacgctctgtgcctgttcgagagcagactttcgccagaaacggtccagtgactctgaagatctaccagagcgtcaatctatcacgggtgattcgtcaagttacctactgagggctccgagaaggagctccccacgatggatgaggaggctctaaagccagcctgaggcgtggattgtggaagctatggtaacttgaaagattgccacctttgtgtataggactgtgttctaggcatccccctaggtactccgaaggacctgtgctgatggaggtgtgacagtcctcatgcagcctgaggaggattctgttttgtctgtgtcgactctcacacagaacctgtatgtgtaatattcagagtctgtgcttatggtgactggaggagctgcggaagatatcgttatcctgtgttagatgctttaatgttcacaaagcctgtcttgtgactggactgtcagctgttcaactgttcctgtattaagtgctattacctatctcagttaccagagtcttgctgctaaagttgcaagtgaccgacaatggatttttaaccatgacgttttttgtttttgaaaaaaaaaaatcaaaggcagtaactattttatatggagatgtgtcttgattatctctaataagtgtgtatttatagtatctcctatggatcaattacagagcacaatgattgtcactggatatatatgtatatgtacattacaggtatatgtacgcatatatattctattattaagcatagaggtagctcctgttttacaactctaactactatatttctacattgtgacttgttttactttaaaaggggataaacaaatttatagtaactataaagtatcaataattttaaatactcatctctcttttactaagaagggatttttgaatatagtgtctacttggtttctctctcccagtaagaagcaggtgcctttggggatgctccaacctgtttcatccccgaaagtttttctgaggacaccgtcatgcacgcatgaccttaaatttctaaaaggttttcttcctcaagagaccaatgaaggcaagataaccgcactcagcaaacatgagatgttctgctcagatgtgaattttcaatgcagcaaagttgactttcgtactcccaataaatgactcttaacagcc

SEQ ID NO: 242 - DNA, 801 bp, Rattus norvegicus
atgagcctgtccttgctcttcctcatcttctgcagccacctgatcctcagcgctccggctcaaggggagaagcgtctcactcccgaagggcaacccgcgcctcctaggaacccgggagactccagcggcagccggggcagaagtagcgcgacgtttgcttcgtcttctgcctcttccccagtcgcagcttctccgggcagccaaggaagcggctcggagcacagcagtttccagtggagcccttcggggcgccggaccggcagcctgtactgcagagtgggcatcggtttccatctgcagatctacccggatggcaaagtcaatggatcccacgaagccagtgtgttaagtattttggaaatatttgctgtgtctcaggggattgtaggaatacgaggagttttcagcaacaaatttttagcgatgtcaaaaaaaggaaaactccatgcaagtgccaaatttacagatgactgtaagttcagggagagattccaagaaaacagctataatacctatgcgtcagcgattcacagaactgaaaagacaggccgggagtggtatgtggccctgaacaagagagggaaagccaaaagaggctgcagcccacgggtcaaaccccagcacgtctccacccacttcctacccaggttcaagcagtccgagcaaccggaactttccttcaccgtcactgttccagaaaagaaaaagccacctaggccctggaaaccaaaggttcccctgtcgccatctcgtagaagccccagtccagtgaagtacagactgaagtttcgcttcggatga

SEQ ID NO: 243 - DNA, 1843 bp, Rattus norvegicus
gaattcggcacgagctctctgaggcaccatgctgacccgcctgttcagcgagcccggcctcctctcggacgtgcccaagttcgccagctggggcgacggcgacgacgacgagccgaggagcgacaagggcgacgcgccgccgcagcctcctcctgctccagggtcaggggctccaggacccgctcgggccaccaagccagtgtctcttcgtggagaagaggtccctgaacccacgttggctgaggtcaaggaggaaggagagctgggcggcgaggaggaggaggaagaggaggaggaggaaggactagacgaggcggaaggcgagcggcccaagaagcgcgggccgaagaaacgcaagatgaccaaggcgcgcctggagcgctccaagctgcggcgacagaaggccaacgcgcgggagcgcaaccgcatgcacgacctgaacgcggcgctggacaacctgcgcaaggtggtgccctgctactccaagacgcagaagctgtccaagatcgaaacgctgcgcctggccaagaactacatctgggctctctcggagatcttgcgctccgggaagcggccggatctggtgtcctacgtgcagactctgtgcaaggggctgtcacagcccaccacgaatctggtggccggctgcctgcagctgaactctcgtaacttcctcacggagcagggcgcggacggcgcggccgctttcacggctcgggtggcccgttccgccatgcatccgtacccgtacccgtgctcgcgcctagcaggcgacagtgccaggcggccggcggctgggcggaggcgcggcgcacgcctgcggacccacggctactgcgccgcctacgagacgctgtacgcggcggcgggtggcggcggcgccagcccggactacaacagctccgagtacgagggtccgctcagtcccccgctctgtctcaacggcaacttctcgctcaagcaggactcgtcccccgatcacgagaagagctaccactactctatgcactactcggcgctgcccggctcccggcccgcgggccacgggctggtcttcggctcgtcggccgtgcgcgggggcgtccactcggagaatctcttgtcttacgatatgcaccttcaccacgatcggggccccatgtacgaggagctcaacgcgtttttccataactgagacctcgcgccgacctctctttttctttgcctttgtccggccccctagccccagccccacgagctcaggggctcccacggactccagcgccggggccggggcgcgggccgccggttctgcagctctccagagcggcgtggtctcttacctgtgggtggcccgtcccaggggcctcgtttgcctctggggactcgccttctctctctccccagcgggcttcctcctcccttctctcctggagagcatctctggggacctcccgccaggccctcccaggagactccctccacattcccaaacttgggttttctctccccgcctcccagcaggccagaggcagttggtaaggggctgctgagtttcggggatagtgtctcctccacttatggttactttaaaaaaacaggcacagagctgcccaggccgaaaagagttggtatctcttccttctcgaagaggccaaagccagggcgcccaaacgccttcaccccaacacgaatctccgcgttttttattttttattttggtgggaggggatgtggattgagaggaaagagagaggccaagccaatttgtaactagaaccatttttccttttccctttttaaaaaaaagaatccaaacatacaaaaggaaaaaaatagaaaaaaaaaaaaaaaaaaactcgag

SEQ ID NO: 244 - DNA, 4153 bp, Rattus norvegicus
ctcatgcttggcggcgcgggccaagccccggagcatggaccagaggcaccgcagcggtactgcgtcacatggtgacctcagcctcagggatgccgggctggactgggagggggcgcggccgcacccgggcatggacacccggtcctggcccgcgcccccctcgctgaagccccaggtccagtcactaggcagcccggccgctccccgaggttcccaatggatctggatgacccctaatcccagaaagacttcaagatccttttgctcccactgaccacaccatctgggtacagggaccatggcacaagccctactcaggagcagctactgggctgcctagtgactggacctggggcttcagcgaggggggcgcgggccaggaccgggtgtccatgcccgggtgcggccgcgccccctcccagtccagcccggcatccctgaggctgaggtcaccatgtgacgcagtaccgctgcggtgcctctggtccatgctccggggcttggcccgcgccgccaagcatgaggccacggccagcaggggcgctccgggccggggctgcgctgtcgcctgtgctgctgcttctgctactgctacagctgctggggcatctgtgggccgcaagcacacctgccccatcctccttgtcacctgggactcagcaggacaaccagctgggtgcaggccgagtgaagcgcggttgggtgtggaaccaattcttcgtggtggaggagtacacggggacagaacccctgtacgtgggcaagatccactcggattctgacgaaggcgacgggaccatcaagtacaccatctcgggcgagggtgcagggaccatcttcctgatcgacgagctgacaggtgacatccacgccacggagcgcctggaccgggagcagaaaaccttctacacactccgggcccaagccagggatcgagccaccaaccgtctgctggagccggagtcagagttcatcatcaaagtgcaggacatcaacgacagtgaaccacgctttctccacggcccctacatcggcagtgtggccgagctgtcacctacaggcacgtccgtgatgcaggtgatggcctctgatgcagatgaccccacttacggcagcagtgcccggctggtgtacagcgtcctggacggcgagcaccacttcacagtggaccccaagacaggtgtgatccggacagcagtgcctgacctcgaccgtgagagccaggaacgctacgaggtggtaatccaagccacggacatggcaggccagctgggcggcctctcaggctccactacagtgaccatcgtggttactgatgtcaacgacaacccaccccgctttccacaaaagatgtaccagttcagcatacaggagtcagcgcccatcggcacagccgtaggccgagtgaaggcggaggactcagatgtgggcgagaacacagacatgacttatcacctgagagaagaaagtggcagtggaggagacgcattcaaggtcaccacggacagcgacactcaggaggccatcatagtggtgcagaagcacctggacttcgagtcgcagcaggtccacacagtggtactggaagccctcaacaagtttgtggacccccgcttcgccgacctgggcacattccgagaccaggcaatcgtgcgcgtggccgtgaccgatgtggatgagccccccgagttccggccaccctccggcctactggaggtgcaggaggacgcgcaggtgggctccctggtcggcgtggtgacggcgcgggaccccgacgccgccaaccggcccgtccggtacgccattgaccgagactcggatttggagcagatcttcgacatcgatgcggacactggcgccatcgtgactggcaaggggctggaccgtgaaaccgccggctggcacaacattactgtgttggccatggaagcagacaatcatgctcagctgtctcgggcatccctacggatccgaatcctggatgtgaatgacaatcccccagagctggccacaccctacgaggccgctgtgtgtgaagacgccaagccaggccagctcattcaaaccatcagtgtggtggacagagacgaaccacagggcggccaccgcttctatttccgcctggtaccagaggaacccagcaaccctcacttctctctgctggacatcgaagataacacggctgcggtgcacacccagcatgtgggcttcaaccggcaagagcaggatgtgttcctcctgcccatccttgttgtggacagcgggccacccaccctgagcagcacaggcaccctcaccatccgtatctgcggctgtgacagttccggtaccatccagtcctgcaacaccactgcctttgtcatggctgcctccctcagcccgggagcactcatcgctctcttggtctgtgtcctcatcctggtcgtgctggctttgctgattctcaccctcaggcggcaccacaagagccacctgagctcagatgtggatgaagacatgcgggacaacgtgatcaaatacaccctgggatcaggacatcgagggacaagcaacaaagaggatcatcagtgtccagctagtctctctctggggttcaaaccttgaatcaatgccctagtgagggggcactggccatgacccctcaacctttgctctgcttgtatcttgagtctgagtccttccctgtacatctgtgctcgtgttcatcagctagtgaactgaagtgcttccctccccgaggggggtcgtcccttgtgactgaccatgttgtcctaacaatgtcctgagcagaagggtccccaatgggaacctctcaggaggggggtttggggcggcgggggggggaccagcatcttgctggcaactgtgggtggggtggggtgcttccttctggaatgagcatgtggctgacccccaaaggcatgccccctccccccccacccaccttcttggagatgtcccttccttttggggtagtggggacattaggagcaacctcctagggttgttgtgagaattaaatgaactgtagcagcctgaggcagggctgggcagaaacctcagcacatgtttgttgaaaggtttgcaggtggatcaagtcacccaactcacagtctcatgtgtctcgtctattctcctgcagactcctgtagcccctatgcccagggctcttcttgctccagctaggggctcctaaagacaacaggccgtccaggagactttgagtaaggacatgagtaatgtgtgtggccatttccagagcactttctatgtaatatgaccgtgttattcctatgtaattcgtgtgtgtcaagggggtagcctcgtgtctagagaggggtgaattggcattgatttttttttattagttttcatgacttttaaagaggtaggtgggaaagagaactgggagagccccacctcactcgtggggttgaggacaatggactcttttgctacagtggctaagacgggggtggggacaaagtcggacatggttggcattgtgatgacctctcatggtccggtttcccccgtccctgcctaacgttttttattatcaaacatttcacaacggggaaatttcttgcttcccaagggtggtcttggggagctgctgggaatcaggggagggggtggtggtggcccaagtctggtagcatgtgctgacctcacctcttagcaacggtgtgaccttaaacaagtcatttagcttccaagtttcagttcctttcacacctagatagacatttaaaaagaaaaaaaaaaaggaaagagaaagtggggggtggggggaggtggggtggtggggggtggggggaaaacagctggtctaccccacagagtgcttctgaagaccaaacgatgtaactcacaagaaagtgccttgtaaatcgcccagaaattgccaaatacttactaaccaaggaggctgtccctaccgcccactggccagcccgaggctcactgttgtgagcacacagtaggggctgggtatttgtgctcgataaataatttccagagttagaaagaaaaaaaaagttcattcaacaaacattttctgagacgctgaccatgtgccccatgcaccaggctatggctgaggtacaaagataatgacgaacagtctctttcggaggctaattaggacccg

SEQ ID NO: 245 - DNA, 6628 bp, Rattus norvegicus
agcagctggcctcccaccaccctaaaaataatccactcgccgctgtctgctgacccgggaggaaaacttgtcatcccatggagtgtgtgagctcctcggcttgctccagagagatccccaaccgctttgaggagtcagtgactgagttctgtggacttgtttgaaatttacatcttcagactgtgcgcaggcggttggaaggtagatcaagtgcaccagtagggggactaagttcctgagccaaagtcaaggctaatcaactaagaagaaatgagcctttccttctgtggtaacaacatctcctcctacaacatctaccatggtgttctccaaaacccctgctttgtggacgcactcaacctggtccctcacgtcttcctgctgtttatcacctttccgatcctgttcattggatgggggagccaaagctcaaaagtgcaaattcatcacaacacatggcttcattttcctggacacaacctgagatggattctgacgtttgcactcctgtttgtgcatgtctgcgagatagcagaaggcattgtttcagactcgcaacgggcgtccaggcatctccaccttttcatgccggctgtgatgggatttgtcgccaccaccacatccattgtgtattaccacaacattgaaacatcaaacttccctaaattacttttagctttattcctgtactgggtcatggccttcattacaaagacaataaagttggtcaaatactggcagttggggtggggaatgtcagacctgcgcttctgcatcacgggagtgatggtcatcttgaatggactgctgatggctgtggagatcaatgtcatccgggtccgaagatatgttttcttcatgaatcctcagaaagtgaagcctccagaggacctccaggacctgggcgtgaggttcctccagccgtttgtgaatttgctgtccaaagctacttactggtggatgaacacgcttatcatatcagctcacaggaaacctattgatctgaaggcgatcggaaagttgccgatagcaatgagggcggtgacgaattatgtttgcttgaaggaggcctacgaagagcagaagaaaaaggctgcggatcatccgaatcggactccctccatatggctggccatgtacagggcttttgggagaccgatcctgctgagcagcacgttccgctacttggctgacttgctgggctttgccggccctctttgtatttccggaatcgtccagcgtgtgaatgaaccgaagaataacacgacgagattttcagagacactctcatcaaaggagtttctggaaaatgcccatgtgctggctgtcctgctcttcctggccctcatcctgcaaagaacatttttgcaggcttcgtactatgtgaccatagagaccggcatcaacctgcgtggggctctgctggctatgatctacaacaaaatccttcgactgtctacttctaacctatccatgggcgagatgaccctgggacagatcaacaacttggttgccatagaaaccaatcagctcatgtggttcttgttcctgtgtcccaatctgtgggccatgcccgttcagatcataatgggggtgatcctgctctataatctgcttgggtcaagcgcactggtaggcgcggcggtcatcgtgctcctcgcaccgattcagtacttcatcgccacgaagctggcggaggctcagaagagcactctggattattccaccgagaggctgaagaagacaaacgagatactgaaaggcatcaagctccttaagctgtatgcctgggagcacattttctgcaagagcgtggaagagactagaatgaaggagctctccagcctcaaaaccttcgcgctctacacgtcgctttccatcttcatgaacgcagccattcccatcgcagccgttcttgcaacatttgtgacccatgcctatgccagtggcaacaacctgaaacccgcagaggcctttgcctctctgtctctcttccacatcctcgtcacaccgctcttcctgctgtccacggtggtcagattcgcagtgaaagccatcatcagcgttcagaagctgaatgagtttctcttgagcgatgagattggcgaggacagctggaggactggggaggggacgctgccttttgagtcctgtaagaagcacaccggagtgcaatcaaaaccgataaacaggaagcagcctggaaggtaccacctggacaactacgagcaggcgcggcgtcttcggcctgctgagactgaagatgttgccataaaggtgacgaacggatacttctcatggggcagtggtttagccacattatccaatattgacattcgaattccaacaggtcagctaaccatgattgtgggtcaggtgggttgtggcaaatcgtctctcctccttgccatccttggtgagatgcagaccctggaaggaaaagtttactggaacaatgtaaatgaatctgagccttcttttgaagcaacccgaagcagaagcaggtactctgtggcttatgctgcccagaagccttggctcctcaatgctacggtcgaggaaaacatcacttttggaagttctttcaacagacagaggtacaaggctgtcaccgatgcctgctctctgcagccagacattgatttgttaccctttggagaccaaactgaaattggagagaggggtatcaacctgagtgggggtcagaggcagagaatctgcgtggcccgggcactctaccagaacaccaatattgtcttcttggacgatccattctccgctctggacatccacctgagcgaccacttgatgcaggaagggatcctgaagtttctccaggacgacaagaggacggtcgtccttgtgactcacaaactacagtacctgacgcacgcggactggatcatagccatgaaggatgggagtgtgttaagggaagggactttgaaagacatccagaccaaagacgtggagctctatgaacactggaaaaccctcatgaatcggcaagatcaggaattagaaaaggacatggaagccgaccaaacaacgctggagaggaagactctccgaagagctatgtactcaagggaggccaaagcacagatggaggatgaagatgaagaggaggaggaggaggaagatgaggacgacaacatgtcaactgtaatgaggctcaggacgaagatgccctggaagacctgttggtggtacctcacttcaggagggtttttcctgctcttcctcatgatcttctctaagcttttgaagcactctgtgatcgtggccatcgactactggctagctacgtggacctccgagtacagtataaacgacccagggaaagctgaccagaccttctatgtggctgggttcagcatcctctgtggagcgggcattttcctttgcctcgtcacctccctcactgtagaatggatgggtctcaccgccgccaagaacctccaccacaatctcctcaataagataattctgggcccaataaggttctttgataccacgcccctgggactgatcctcaatcggttttctgctgataccaacatcatcgaccaacatatccctccgaccttggagtcgctgacccgctctaccctgctctgcctgtcggctattgggatgatctcctatgctacacccgtgtttctcatcgctcttgcgcccctgggcgtcgccttttatttcatccagaaatacttccgggttgcctctaaggatctccaggaactcgatgacagcacccagctccccctgctttgtcacttctcagaaacagctgaagggcttaccactatccgggccttcaggcatgaaaccagattcaagcaacgcatgctggagctgacagacacaaacaacattgcctacttatttctctccgcagccaacagatggctggaggtcaggacggactacctgggagcttgcattgttctgacggcctccattgcatccatcagtggctcttccaactctggactagtgggcttgggccttctgtatgccctcacgataaccaattacctgaattgggttgtaaggaacttggccgacctcgaagtccagatgggcgcagtgaagaaagtgaacagtttcttaactatggagtctgagaactatgaaggcaccatggatccttctcaagtcccagagcattggccacaggaaggtgagatcaagattcacgatctatgcgtcagatatgaaaataacctgaagcccgttctgaaacatgtcaaggcttacatcaagcctgggcagaaggtgggcatctgtggtcgcaccggtagtgggaagtcctctctatctctggctttcttcagaatggtcgacatatttgatggaaagatagtcattgatggaatagacatttccaagctgcccttgcacacgctccgctctagactgtccatcattctccaggacccaatcctgttcagcggctctatcagatttaacttggatcctgaatgcaagtgcacagacgacaggctctgggaggctctggaaattgctcagttgaagaatatggtcaaatctctgccaggaggcctagacgccactgtcaccgaaggtggtgagaacttcagcgttggacagagacagctgttctgcctggccagggcctttgttcgaaagagcagcatactcattatggatgaggccacggcctccatcgacatggccacggaaaacattttgcagaaagtagtcatgacagcctttgcggatcgcacggttgtaaccatagctcatcgggttcacaccattctgactgctgacctggtcattgtgatgaagagaggaaacattttggaatacgacaccccggaaagcctcttggcccaggaggatggagtgttcgcctcgttcgttcgtgcggacatgtgacaggattacatcacaacagcacctgtgtctcgatgcctaccgtcgcccaccagagggttcccccaactttgcctcggaagggtggcgccggaaacttcgacagacttctgtatggaaagtagagatttctgtttcctgttttggtctgagggacactccctgtaggttcatcgtgggtgttgtactgtgatcaggccacactggaaaggtagcctatgctaaaacatgccagcgaccttaaggggtaaatctgtcgatgtctgtcaagcactggagctgaaatgaggcgtctgcgctaccacactctcattaggaagactagcactgccctgctgttgatgaagaaaattcattttctaacaaaatactcacgttcatgatccataggagagtcttttctgtgcatttaacattgttgatatttccttttaacttttccccttttaactcatttcctgtcaccacgaagctatcatatttagtacctctataaagccgacccctcacaagagaaagatcatgaaaagagattgaatatttgaaaatattatttgtttccatttgcctccatccaataaggaggaagttcaagttagcttcagtccttcagcaatgggccacctaaactaagctttctagagtttaattctttatcagccaaacaatggctctgaaccctgaaatgctatattatctagggcccaaaagaatatagatgaatggccttatctgtcacacacacacacacacacacacacacacacacacacacacacacacacatatacatacacatcttcatgccatatcttggctgtatgctaatcttggcatgtgcacattcctcgaaggtaccagatatcccctaccctacatctctgtgggaagatagaaatagttctcactctgaatttacacaggtagcaagtgtttattttcacttgggcaaatttcagtggcagacattgatgtcacacatgtggccattggtcctgttctaatttatagagtgtaccagaagtctatatgatattagtgtcacatttcatttaavtgcccattaataaagccaaactgactgaagttcacttccctgttatccagcttccacagtttctgtaacctttaaccatcagatataagcagctgctcaattccatatgagggtctccacagaaaatagatgtccatcgcccaccgttcctgtagtcatatggcgttgtttattctgtgtcaagacttatagttcttgtgcatcgagatatttcaaggtgcctttatggatatagaacgtaatgtaagaaaaacgttcatagagatatacagaaacggcccaggttacttagcctaaatagtcaccttttcttccatatcaaaaacttcattagaaaaaaataatagtattatttgcagaaagctagtaggtcacagctattagcaatgagttcaaccgcaaaagtacttcataagagaatcgactaatctactaaaatattgctggtgctgcagaaggttctgctggggctgatacccatgacgtttgttgtcagtcagtgtctccttctctcctagaaatggcattcatctacagaagtagctccctgctgctgtagcccactacgccatcctgtgcaaaagtgactttcgtttcctcgaaacttttacttacttgatttgcaaaaaacaaacaaaaaacaaacaaacaaacaaaaaaaaaaaa

SEQ ID NO: 246 - DNA, 433 bp, Rattus norvegicus
  misc_feature (1)..(433): n = a or c or g or t
acaaaaaactgtttattgctgtgacagccaccagaagctgtcaaggagcccattgctgtgaggggccaggcagccagtggatgggctgaacgccagtctcacgagtcaaccaacctgctgctggccccgcccacccagcaataggctgtcacactgattaaaacccaaccaggagataggaaacccccataggttcaccttcctaggtctcatgacctagacgaagaagagtgccccaaatacccctccaaaataagacctgccctggtccctcatatttctgaggatcctggggtgtcatacagccctgcagcaagccagagttgcagccccaaggaagtaccagctcctctctgttccacaggctgtcccaagantccagcccaaggtattcagctgcctctagaatgcagggggggaatcactaggaata

SEQ ID NO: 247 - DNA, 4862 bp, Rattus norvegicus
gccgaggctcgcccctccttgcaaggctgctccagagctagcgggcacgcgagctcctctccgggagcttccttccccgaaaggccgggacccagtggcggactcgtggtgagcgaggcagcaccttcgatcccaggagattgacctgttcttaaaagtgaaagaagaaatctaagaaaaacgctatggcaaagagaataaaagctaagcccacttcagacaaacccggaagtccatatcgctctgtcacgcacttcgactcactagctgtcatagacatccctggagcagatactctggataaattatttgaccatgctgtagccaagtttgggaagaaggacagcctggggacccgggagatcctgagcgaagaaaatgaaatgcagccaaatggaaaggtttttaagaagttaattcttgggaattataaatggataaactatcttgaagtgaactgccgagtgaataactttggaagtggcctcactgcactgggactgaaaccaaagaacaccattgccattttctgtgagaccagggcggagtggatgattgcagcgcagacctgctttaagtacaactttccgcttgtgactttatatgctacccttggcaaagaagctgtcgttcatggattaaatgagtctgaggcttcctatctgattactagtgttgaacttctggaaagcaaactgaaggcggcattattagatatcaattgtgttaaacatatcatttatgtggataacaagactatcaatagagcggagtaccccgaggggcttgagattcacagcatgcagtcagtagaggagctgggatccaagccagaaaactcaagcattcctccaagtagaccaactccttcggacatggccattgtcatgtacaccagtggctctactggccgccccaagggagtgatgatgcaccatagcaatctgatagctgggatgacaggccagtgtgagcgcatacctggattaggaccaaaggacacatatattggctacttacctttggctcatgtgctggaactgacagcagagatctcctgctttacctacggctgtaggattggatattcgtcaccactcacactgtctgaccagtccagcaaaatcaagaagggaagcaagggtgattgtactgtactgaaacctacacttatggcggccgttccggaaatcatggatagaatttacaagaatgttatgagcaaggttcaagagatgaattatattcagaagactctatttaaaattgggtatgattataaattagagcaaatcaagaaaggatatgatgcccctctttgtaatctgatactgtttaagaaggtgaaggctcttctaggaggaaatgtccgcatgatgctgtccggcggtgccccactgtccccccagacacaccgattcatgaatgtctgcttctgctgccccattggtcagggctatgggctgacagaatcatgcggtgctggaacagttactgaagttaccgactacactactggaagagttggcgctcctcttatttgctgtgaaattaaactgaaggactggcaggaaggtggttatacagttcatgataagccaaaccccagaggtgaaattgtgattggaggccagaatatctccatgggatattttaaaaatgaagagaaaacagcagaagattattctgtggatgaaaatggacaaaggtggttttgcactggtgatattggagaattccaccctgatggatgcttacagattatcgatcgtaagaaagatctggtgaagctgcaagccggagagtacgtgtctcttgggaaagtcgaagccgcactgaagaattgtccactgatcgacaacatctgtgcttttgccaaaagtgaccagtcttatgtgatcagttttgtggttcccaaccagaaaaagttgactcttttggcacaacagaagggggtagaaggatcttgggttgatatttgcaataatcctgccatggaagctgaaatactgaaagaaattcgagaagctgcaaatgccatgaaattggaacgatttgaaattccaatcaaagttcgattgagcccagagccatggacccctgaaactggtttggtaacagatgccttcaagctgaaaaggaaggaactgaagaaccattatcttaaagacattgagcggatgtatgggggcaaataaaaggcaactgtctacttcacatttgcacaggaggtggcctgatggtttttttagttctagagtttaagcctttgttgatctctctgttaaaatgtaaggtgaatcttctaaagacatgaaacaaaaaaacaaccaaaagtggttacaataaattgcatagtcctagagaagctgaaattgaagacatttccctttagctgtgttattaagtttagagcaaaaattctgttttagaatattagccttagctacacttgtttttctaaagatactccatgctaaagtaaacaaattggacttggactaggtgtagttgaagaaatctacagcttccagtgtctatgtcttcctagttcagaagtttctatcgtaatcattaggacaaaattacgtattaacactactcaaagccgaagttccaccaggctttgaaatcctcttccaaccatttctcttgaagggaaaaaaatcagttgtaataaatggattcagtatcttagaaggtattattttaagctcataattgccatgtaggtgagacatagaatcattataatattgtgaataattacagtgcctgaagttaaaactaaaacaacacacacataccaaaaatatctcataatgtatttgaagggaggctgaattgctcctttggatgtctaagaacttaaatcagcaactgtaattattgaaatgtcttcagaaaaatgtccactttgtaaaagtgacctttctgtgtgtgatctagtcaaaggctgagaccaaggggaacatgttagaaagtcaatcagaattcaataagatacattgcttttctgttagaaagttcatggcatcctaagcattcagaattaggatcctggcatagcactgagcctgggaaagagatttagcctctttaactttgataccagggcttgattttaaaatgtgcttgtattaaattacatttgtaatttatggtctgtttgctgttgctgattgattcttgatcagtagtgtgcatttcagagagcctttcattttgctttaatttcagcaaagcgggttatgataaatgacttcctcgaatcttgttcaaacctacgggtgattaagtgtcttggatgagtctgaggaagttaaagggaagaaaacactgttaacacttttcctgtttgtgaagagtttagaaactggaaatgctagatttgggagaagggcagagttacttgattaaggactgtctgtgcagtaacttgggagtgtgagtttctttttaaatcttcagctaaaatctggaattatatattcttgatagatattcgcacttgaaccatagttactgtatgtaaaaagcaaaaattcttaatactgttattctttgcacttttttcatagtcattttatacacacacacacacacatgcatgtgtatgtgtgtgtgtatatataatatatatatgttgcttacattgtgttgtacagatgtgggccaccactacaacaaaatgagttctttgtgctctaaaatatttataaagaaattatttaaatgttatgtatatggtggtaatattgagaaaaaaaatcatctggtattctgagcaacagcgaaggtttttgtaaaagtttcttttcagtgttgtgcaaactaaaatttgaggcaagttttccctgaagttctatgtgagtattctcatgcttcccatcttgcctttgaagtgtgaaaagacatcaagtagactactagtcagcttctacctactcctagtgcactgtttatccgtttttttttaaaggcttttccaatatatgtatcccatttggaatggtgattttaaaatgtgagtgcatgcagactatcttacttaagatacttgcaccccacccacagccatctcccaaagctggaacactgccaactaggtccttaagaatcacgcattgaatacaaggtcgggtgctgctaattcttcatgaaaatcctaacacacacgttaagggaccagggagatgccactgccctctgacttttcatcaaaaaaaaaatatatatatacatgtttatgtaaacagaactattttccatattcatagtgactttttaagtatttgagcctaaaggttttgatctccattttatacctatttaaatcgttcacaatttcatgtcagccatcaattaaagctgtgcttactgttgattgtgtgtgcatttctaaggtgaacgctcctaattttttgctttaattacatgaaagggtcttatttctttgatatttgtgctcttttttttaatgtagactgaaggtatgattgtgtgacttttaagaaatgaaataccgatgaatgatccatagagtccaaagtgagggagaatgctgtttctttgttcatagagactgactagtaatctttgcctatattttcctggtagcagatgacaaatgtttctacagtgacaagctgagaagaggttaaaggttaaagattgtgtggcattcgggaactggagagatacgttttaattttgaatgtagttacaaattttatattcatatttgtactttctgttaatgcacgattgtagaattgttctgtagattttttgtgtttactcttgaaaggctttgtttgttcttctttttaagtttgcacttgaatcttataaaataaatc

SEQ ID NO: 248 - DNA, 1049 bp, Rattus norvegicus
gccttcggttttagggagagcaggccgggcggtcagagatcatgggggagagcgcactggagcccgggcctgtgcccggggcgccggctgggggtccggtgcacgccgtcaccgtggtgactttgctggagaagctggccaccatgctagaggcgctgcgggagaggcaggggggcctggctgagaggcagggcggcctggcgggctcggtgcgccgcatccagagtggcctgggcgcgctgagtcgcagccacgacaccaccagcaacacactggcgcagctgctggccaaggcggagcgcgtgggctcccacgccgacgcagcccaggagcgggcagtgcaccgcgccgctcaggtgcagcgactggaggccaaccacgggttgctggtggcgcgcgggaagctgcacgtcctgctcttcaaggaggagactgaaattccagcccgcgccttccagaaagcaccagagctcttgggcccggaggaccagttggtgctaggcccagagcagccagaggatgaagttggagagagttctgatgaggaacccgtggagtcccgggctcagcggctgcgacgcactggcttacagaaggttcaaagcctgaaaagggctttttccagtcgtaaaggctctgaagcagcacagcccacgccagtcaagccgccacgcctaggtcctgtccggaactccgaaggcccggcagaaggccagcctgcagctcagcctgcaatggagcctgtgctcccgtctgccctggagccagaacctcctcagcctaccaaggaagatcctgagagacctgtgcttcaaatagagagcgcagcctgatccctggggctgcctgccccattcagcccttatgccttgtcccaaaaataaatactaatcgagtgcagcacttacatccaaataaggagagaatcctgcatccactgcccggctccaatccttccttcctggttttccagtctggtaccctgtgtcctctgaaagaggaacattcggccttgtttaggttcaccaccaataaaagtaattttctct

SEQ ID NO: 249 - DNA, 553 bp, Rattus norvegicus
tgaattcgtgggttacccctagccccgcctgagaggtgggagccaagtgctttcttgggtgacacaggagcagcttctacgttcgattgagcgggcctgggaaaggttcccagaaggccgcgcgctggagtctctgagcgcagtcatggcgggcttggtgaagaagactactggcctggtgggattggccgtttgcgacactccacacgagaggctaacaatattgtatacaaagattcttgatcttctgaagcactttcctaaacatgcagcctacagaaagtacacagaacagatcaccagtgagaagctggagttggtcaaattggaaccagatgttaaaaaattagaaaacttgcttcagggtggtgaagtagaagaggtgattcttcaggctgaaaaagaactaagtctggcaagaaaaatgttgcagtggaagccctgggagccactggtggaggagccccctgctaaccagtggaagtggccaatataatccccgtgtctgatgatggatgtggatctaatgtgcaattaaatgttctgtgatgcc

SEQ ID NO: 250 - DNA, 994 bp, Rattus norvegicus
  misc_feature (1)..(994): n = a or c or g or t
acatctgggattctgtcagataaaagaacttggagagtttttaaactccttcacatctaatttccccaggaaaggggtcacagttccatgatggtggtgggagatcnggaanagagcttggccaaatttaagaaacaccaggcagccctgccctccattcttggaagacagggattgtggtgagccccttcaatgcttccctagaatttacnggaaaatcttaaaatccaaggccaggagagaagaatccaaaaaagcaatatttttcatcatatgccannaatgggataganagaaggagtggcaggcctangcccctccgattgtcccttggggtttaccccttagcccacctcaatatggtgctgggtnnangggtanctgggttctaaccttaaacagggaagactcccgcctctatacagagaccctttaatttttttattctgattagccntctttaaaccancaaanaatnaaatnnatcctnatctaaaacatctgggattctgtcagataaaagaacttggagagtttttaaactccttcacatctaatttccccaggaaaggggtcacagttccatgatggtggtgggagatcnggaanagagcttggccaaatttaagaaacaccaggcagccctgccctccattcttggaagacagggattgtggtgagccccttcaatgcttccctagaatttacnggaaaatcttaaaatccaaggccaggagagaagaatccaaaaaagcaatatttttcatcatatgccannaatgggataganagaaggagtggcaggcctangcccctccgattgtcccttggggtttaccccttagcccacctcaatatggtgctgggtnnangggtanctgggttctaaccttaaacagggaagactcccgcctctatacagagaccctttaatttttttattctgattagccntctttaaaccancaaanaatnaaatnnatcctnatctaaa

SEQ ID NO: 251 - DNA, 1111 bp, Rattus norvegicus
agagccaggaagaaacaggaacaagacacagaccatgagctccagccaatcaggggtctgcccatgccagggctctgcaagccaccccaccattctctacacacttctaagccccggtcccaggaccaggcccatggcacccgcatctcgcagccactgcctgtgccagcaacaccggcctgtgcgcctgtgtgctccacaccgcacctgcagggaggccttggatgtcctaggcaagactgtagccttcctcaggaacctgccgtccttctgcctcctgccccatgaggatcagcgacggctgctagagggctgctggggccctctcttcctgcttgggttggcccaggatactgtgacctttgaggtggccgaggctccggtccccagcatacttaaaaagatcttgctagaggaacccaacagtggtgcccagggtgcccagccaccagacccaccacaaccctcactggctgccgtgcagtggctgcagcactgcctggagtctttctggagccttgagctgggtcccaaggagtacgcatacctgaaaggcactatcctcttcaacccagatgtgccaggcctccatgcctcctgccacattgcacacctgcaacaggaggctcactgggcattgtgtgaagtcctggagccctggtacccagctagccaaggccgcctggcccgaatcctcctcatggcttccaccctcaagaacatctcctgtacccttctggtagatctcttcttccgccctgtcatcggagatgttgacatcactgaactgcttgaagacatgcttttgttgaggtgacctgtagaatggggtccggtgcctccaaaggggagcctgaaaggccgcactcagctcccctggagcagccctcgtctcagccccacccccagcttggatttcctcggtttgcatacagtgtttgactaactgtccagcaggcccttgatggctcccaaaacctccaggccaatatgccttcccttacctgggtagggatgggagcatgaggctgtgcttcagggcagaattcctccagactttatatagaactaagttaagttattggtttttgtaataaaaggtgtgaactgc

SEQ ID NO: 252 - DNA, 2208 bp, Rattus norvegicus
ctctaagagccatggagagcagcggacccagcagctgccacagcgcggcccggcggccacttcactcggcacaagccgtggacgtggcctcggcctccagtttccgcgccttcgagatcctgcacctgcacctggacctgcgggccgagttgcctccgggcccgggtccggggagccgcggactgaacggcaaggcgacgctggaactgcgctgcttgctgccggagggcgcctcggagctgcggctcgattcgcacagttgcctggaggtgatggcggcgaccctgctgcgggggcagcccggagaccagcagcagctcacggagcccgtgcctttccacacacagcccttctcgcactatggccaggccctgtgcgtggtctttccgaagccctgctgtgccgccgagcgcttccggctggagctcacctaccgcgtcggagagggaccaggggtttgctggttagctcctgagcagacagcaggaaagaagaaaccctttgtgtatacccagggtcaggcagtcttaaaccgagcctttttcccttgcttcgacaccccagccgtgaaatgcacgtattcggctcttgttgaggttccagatggcttcacagctgtgatgagtgcaagcacatgggagaggagaggaccaaataagttcttcttccagatgagccagcccatcccctcctatctgatagctttggccattggagatctggcttcagctgaggttggacccaggagccgggtgacagagccctgcctgattgaagccgccaaggaggaatacaatggggtcatagaagaatttctggcaacaggagagaagcttttcggaccctatgtttggggaagatatgatttactctttatgccaccatctttcccgtttggaggaatggagaatccctgcctgacctttgtcaccccgtgcctgctagcaggggaccgatccttagccgacgtcatcatccacgagatctcccacagttggtttgggaacctggtcaccaatgccaactggggggaattctggctcaatgaaggcttcaccatgtatgcccagaggaggatctccaccatcctgttcggagctgcttacacttgcttggaggccgcaacggggagggctctgctacggcagcacatggatgtgtctggagaggaaaacccactcaacaagcttcgggtgaagattgaaccaggtgttgacccagatgacacctacaatgaaaccccctacgagaaaggttactgctttgtctcatacctggcccatctggtgggtgatcaggaacagtttgacaagtttctcaaggcctatgtagatgagtttaagttccaaagtatcttggctgaagactttctggaattctacctggagtatttccctgagctgaagaagaagggagtggattccatcccaggttttgagttcaaccgatggctgaacacccctggctggcccccctacctccccgacctctcccctggggactcactcatgaagccagctgaagagctggcggagctgtgggcagcctcagagccagacatgcaagccatcgaggctgtggccatctctacctggaagacctaccagcttgtctacttcctagataagatcctgcagaagtctcctctccctcctgggaacgtgaaaaaacttggggagacatacccaaagatttccaatgctcagaatgctgagttacggctaagatggggccaaatcatccttaagaatgaccaccaagaagagttctggaaagtgaaggacttcctgcagagtcagggaaagcagaagtacactctgccactgtaccatgccatgatgggtggcagcgagatggcccggaccctcgccaaggagaccttttcagccaccgcttcccagctccacagtaacgtggtcaactatgtccagcagatcctggcgcccaagggcagttagaggctcacctgggtggtccctgcctttctgaagaattgttccttcccaaattcatgttctcaagtcagcgtcccggagtttctgttctctgggtttgggtctctgccgtggtggcagcttctggtctagagagtcctgagagtcctaaaagggcctcccatgctccccttagaccaggctgcagagcataaaatgtcattctttttctcttcgaataaatgtttttaagcaagaaaaaaaaaaaaaaaaa

SEQ ID NO: 253 - DNA, 2389 bp, Rattus norvegicus
atttgccgctcaatgtctctctgtaattggagcaacatcactttaaaggttcagagagtacagcatttctggtgaaaaatccccacaacacgccggcgaatgttttaaagggaaatctattagaaggaggcaaggggcgggagcggcggggggcaggagtggggggctcgccagggccccccggccggccgagcgcggcggcgcccctccctccccaccccgtcttgttgtgacagctcctgatactgtttatggaggtgcgtgtcaggtataattagcaatcgatatggaaaacgtttccttgcacccagcacgcctctgacgtcagagccgattagcgcttcttattggtcccaaattccccgggccgcggctaattatcgagagcttgatgttgataaagtaaagcggcggagcgcgggccgaagcatgtgtagggctccgggcccctgtccccgccgccgtccgcgcccccgcgccccaccagccccgcgcgcgagatgatggacggtcgcctcctggagcacccgcatgcccagttcgggggctcgctgggcggcgtggtgggcttcccctacccgctgggccaccaccacgtgtacgagctggccggtcaccagctgcagtcggccgccgccgccgccgccgcggcctcggtgcccttctccatcgacggcctgctcagcggctcgtgcgctgcagcagccgcctcggtggtcaaccccacgccgctgctgccggccgcctgcggggtggcgggcgaaagccagcccttcaagcttgcagactcgggggatccagacaaggagagccccggctgcaaacggagacgcacccgcactaacttcaccggctggcagctggaggagctggagaaggcattcaatgagagccactacccggacgtgttcatgcgcgaggcgctggccgtgcgcctggacctggtcgagtcccgagttcaggtctggttccaaaatcgccgggccaagtggagaaagaaggagaacaccaagaagggcccgggccggccagcccacaactcgcacccgaccacgtgcagcggggagcccatggacccggaggagatcgctcgcaaggaactggagaagatggagaagaagaaacgcaaacacgagaagaaactgctcaagagtcagagccgccacctgcactcgcccggtggcctgtccctgcacagcgcgcctagctcagacagcgacagcggtggcggaggcctgtctccagagccacccgagcctccaccgccgaccgcctcggccaagggccctggagcgcacggctctggcatcgcgggctccgctccggtacctcctggcgagccacccgcgcctggcacctgcgaccccgccttctacccgagccaaagaagcggcgccggctcgcagccgcggctaggccgcccggcggacaaggacacggtcccttgcgggcccggagcggcgtcgactgcaggcctgcctaaggctagcccgttcagcgtggagagcctgctgtccgactcgccaccgcgccgcaaagccaccccagccaacactgcggccacagcggggttggacttcacgccggggctgccgtgcgcacctcggaccctgattggcaagggccacttcttgctctaccccatcacgcagcccctcggcttcctggtgccacaggcagcgctcaagggaggagcaggccctgagttggtgcccaaggacgcgccccccgcgccgcccgcgccgcccgcaccgcccgcgcaggccagcttcggggccttccccggacctgttggcgctgcggacccggctttcgcccgtcgcagccctgaggttgttgcctcccctgggccaccggctcccgcttctttccggggcctagcagcggcggcagcggagagcggtgccggggactgcgcggacgcggggaccgtctgccccgcggccccgccgcccccgcccctcgaaacgtcgcccggtccgggccccagagcccccagtccacccggagagccagccacttgcggcgccgctgagccgggcgctgctacgggatccagcccgcccgagggcgaggaggtggacatggactgagctggggaccgcggccggaagaggcgcttagccagccgagcccgctcgctcagccccagactcccaacgaatcaggtgatcggctcttagagacattgcttttccctcctgctttttttcccttccttttattattatttttaaaggcaaacgaaaacgctgtgtcgatggggaccaaggcagcagctgcaggtcctggggtgaggtcccctccttaggagggatcaaaagaccccgtatcccctaacccacaaaaaccccacaacgagaatcctcagccttgtaaaatgcaaaaa

SEQ ID NO: 254 - DNA, 1867 bp, Rattus norvegicus
agattgcgtggatgggtcaaacaggctgggtcctgccagctgcattcatgcccttgagcctgagcgcccacatctgcctggggtcaggttggaagctctctatcaagaatctgcccgttcccgcctccctgccttctttctttgaataccagggctcctgggagccccatcaaacacgaaagactgccttcctcctgtctaatctctgccccccccttccctgccccttccctgcttcctcaagtgactctgagaatgctagaactcagcacacgggagatgagttgatactggggcatgcagtgagaaggctcaccaggcttggctttggtcttctcattgcctgaaagcaagttttcccctgagacagggtttcttttctccgtgtagccctggctgcctggaattcattctgtagatcgggttagcctcaaactcaggtatctgcctgactctgcctcctgtgtgctgaaattaaaaacccacaccaccactgccaagaggaaagcctctttgcttagctctgctcaccaggacctgactacaccacactcagagaacagagaccaggcttggaagggggaatgagggtcctgctcagaggtctctggattcagtagtcccttgtgtgtgtgcctgcacatctgtgcttgtgagcccgaggtcatgagtttgcgcacgactgttataatgtattacgaacccctgtgtctgcagatacacatgtgtctgtgaatgtttgtgcttgtgtgtgtgtgtgtgtgtgaagagagagagagagagagagagagagagagagagagagagagagagagaacattttgtcttctccacacgtttgttcctctaagcatccctaaatgtggaagagttcattttgctatgcaggagtatataaggaggaacacataactaagctttgcaaagtctcctcttggcccaaattccttttctttttcttcttgtttctttctttctttttttttttttttttttggttctttttttcggagctggggaccgaacccagggccttgcgcttcctaggcaagcgctctaccactgagctaaatccccagcccttcttcttgtttcttataaaccaattgcgtaaaactcaggaagcggcaaaacgttcaaaagaagatgtgtgtgcacgtgtaatcgcatgtgcaggcaccacgggtcttcttacttgccttgttccctcggccctccctgcctcacctggatgtccctctggctcccccttctgagctgctgtctctccctttctctgtttcttgtcctcacacccatggcctcatcccctctatttctccttcccatgtctcttgtgtcaaggagttgagtcctcctccctgtggcgactgcccccctcagaaggtccctgtagtgggagtcagtagtcccttgcccagaacccagttcctacgcctttcctctacatggatcaagcctggcttggccctcacagcctcaggaatctataaagagtaaagagtcactgtggaggaagatctgtgagcagagcctgctgtcgctgcctgtggacccccactctgctgagtgagcccagctcccaccttgtctaggtgggaaccagcctgaatccaggctgttggaatagcttctttgtacagttcttataataaaccctcacctgatgcctctgggatgtggtctccttcaaacctccgtgtgggtgagggctgagggaggctagaagaagggtgggtgagccagcaatggcaaccaacagggatggtgagtttgaggaagtcagggcaggacaggaactctggggttgaaagctgagttccccctccctccttcagcagccctttctcccggcaaccaagatctg

SEQ ID NO: 255 - DNA, 1287 bp, Rattus norvegicus
atgtccgcctggagctttcgccttcgccgccggtaccgctacctgttctgaacggatctccggccgactcgtccctgcgtctcatggccgctagcagatccctggtgcccgacaggctgcgcctaccactctgcttcttgggtgtctttgtctgctacttctactatgggatcctgcaggagaagataacaagaggaaagtatggagaaggacccaaacaggagacattcacctttgccttaactttggttttcatccagtgtgtgatcaatgctatgtttgccaagatcttgatccagttttttgacactgccagggtggatcgcactcggacctggctctatgctgcctgctctgtctcctatgtgggcgccatggtctccagcaactcagcactacagtttgtcaactatccaactcaggtccttggtaaatcctgcaagccaatcccagttatgctcctcggagtgaccctcttgaagaagaagtacccattggccaagtacctgtgtgtgttgctaattgtggctggcgtggctcttttcatgtataagcccaagaaggtggttgggatagaagagcacacggtcggctttggagagctccttctgctcttgtctctgaccctggatggactgacaggtgtttcccaggaccatatgcgggctcattaccaaacaggttccaatcacatgatgttgaacatcaacctttggtccacggtcttgctcggtgctgggatcctgtttactggggagctctgggagttcttgagtttcgccgagaggtacccgaccatcatctataacatcctgctctttggcttgaccagtgccttgggtcagagctttatcttcatgacagtcgtgtacttcggccccctgacctgctccatcatcaccacgactcggaagttcttcaccatcttggcttctgtgatcctctttgccaatcccatcagctccatgcagtgggtgggcaccgtgctggttttcctgggtctgggtcttgatgccaagtttgggaaaggaacaaagaagacctcccactaggaaaagagaggcttcctccactccagaaacacttaaattattatctccaacagtgacatcttgggaaaatggactcagtcacgataagggactgggttccaatctttttataaaaaaaaaaaaaaaaatcaaagggagcaagatggaatattctaaacaaagcacttgggtttaacaagacgcattgctaatttctggttttgtacagaccagcacaaataaagagaagaaaggc

SEQ ID NO: 256 - DNA, 1743 bp, Rattus norvegicus
ctccagcccagcgatgtgtcctggcctctgggggacatgcttctggttgtggggatcacttttatggctcagcattggaagatcagggaacgtaccccctaccacccaaccgaagtgcactgacttccagagtgccaacctcctcagaggcaccaacctcaaagtccagtttctcctctttaccccctcggaccccggctgtggacaactagtagaagaggacagtgacatccggaactctgagttcaatgccagtctgggaaccaaactaattattcatggattcagggcattaggaacaaaaccttcttggatcaacaagtttatcagagctctcctgcgggcagcggatgctaatgtgattgcagtggactgggtttatggttccacgggcatgtacttctcagctgtggagaatgtggtcaagttgagcctggagatctcccgtttcctcagcaaacttttggagctgggtgtgtcagagtcctcaatccacatcattggtgtcagtctgggggctcatgttggaggcatggtggggcatttctacaaaggccagttgggacggatcacaggtctggatcctgctggaccagagtacaccagagccagcctggaggaacgcttggattctggagatgccctgtttgtggaagccatccacacagacactgacaatttgggtatccggattcctgtcggacatgtggactactttgtcaatggaggccaagaccagcctggatgccctgcattcattcacgcaggttacagttacttgatctgtgatcacatgagggctgtacatctctatatcagtgccttggagaacacttgcccactgatggcctttccctgtgccagctacaaggccttccttgcaggagactgtctggactgctttaaccctttcctgctctcctgtccgaggattggactggtggaacgaggtggtgtcaagattgagccgctccccaaggaagtgagggtctatctccagactacatccagtgccccatactgtgtgcaccacagcctcgtggagtttaatttgaaggagaagagaaaaaaggataccagcatcgaggtcacctttcttggcaacaatgtaacgtcctcggtcaagatcaccatacctaaagatcaccttgaagggagagggatcatcgcccatcaaaacccacactgccagataaaccaggtgaagctcaagttccacatttctagccgggtttggagaaaagacaggactcccattgttgggactttctgtaccgctcctctgccagtcaatgacagcaagaagacggtctgcatccctgagccagtgcgtctgcaagtgagcatggctgttctccgggacctgaaaatggcctgtgtgtagcctgagcctactcttgaggcagaggccggaatttttcgagggcagtgtggcaagggctgtttgcaagcgccatattctaccctgtttctactaagggggggaaggccaaattcttggtggttttctccataagtagttactgtggaagggacaggtgactcatattacagaacttgatctccgtcaccgacttacaaagctttatacagatgccatttcagcttctctatttcaacacaactgtgattgcctcacagccttaagtatctatacttaggattcaatggaaaatgtactcggagaaatgttttaaataaattgtcatggaatatctgaaaaaaaaaaaaaaagaaaaaaaa

SEQ ID NO: 257 - DNA, 2216 bp, Rattus norvegicus
gtgttgtttggggagaaatgaaactgcagattgagttagtaccacacggccattggaagagatgaactatagtggtggaggtgtcgggacatggacatcaaggacagagttaaaaggtgacaaaagctggtcacggtggtgtgagcctttaatcccaagacacagcaggcataggcaggcgggtctttgagtttaaggttagcctggctggttccagggcaagccaaggagacttctgaaaaggagcagtgggcaggcggacatgagggttgagattgggattagaagccagtaagtgtctagtccaccgggccacagaccaggaaactgatgggtggaaaccaggaggtgggggtggggtggagatcaggacagataccagtgacctgtgccaagtcaatcaagcccccccagcagatgtgagggcagagtgaagcccggcgtaagagatgaaggcagtgacaggtgaagtgggatctgaaagggagcagccaaggtcatgtggaggtgccctgggcacagaaagttgggacactacctcactgtgccctctttttatctacgcagccctcttggccactgatatgagcccctacgggcttaacctgagcctagtggatgaggcaacaacgtgtgtaacacccagggtccccaatacatctgtggtgctgccaacaggcggtaacggcacatcaccagcgctgcctatcttctccatgacgctgggtgctgtgtccaacgtgctggcgctggcgctgctggcccaggttgcaggcagactgcggcgccgccgctcgactgccaccttcctgttgttcgtcgccagcctgcttgccatcgacctagcaggccatgtgatcccgggcgccttggtgcttcgcctgtatactgcaggacgtgcgcccgctggcggggcctgtcatttcctgggcggctgcatggtcttctttggcctgtgcccacttttgcttggctgtggcatggccgtggagcgctgcgtgggtgtcacgcagccgctgatccacgcggcgcgcgtgtccgtagcccgcgcacgcctggcactagccctgctggccgccatggctttggcagtggcgctgctgccactagtgcacgtgggtcactacgagctacagtaccctggcacttggtgtttcattagccttgggcctcctggaggttggcgccaggcgttgcttgcgggcctcttcgccggccttggcctggctgcgctccttgccgcactagtgtgtaatacgctcagcggcctggcgctccttcgtgcccgctggaggcggcgtcgctctcgacgtttccgagagaacgcaggtcccgatgatcgccggcgctgggggtcccgtggactccgcttggcctccgcctcgtctgcgtcatccatcacttcaaccacagctgccctccgcagctctcggggaggcggctccgcgcgcagggttcacgcacacgacgtggaaatggtgggccagctcgtgggcatcatggtggtttcgtgcatctgctggagccccctgctggtattggtggtgttggccatcgggggctggaactctaactccctgcagcggccgctctttctggctgtacgcctcgcgtcgtggaaccagatcctggacccatgggtgtacatcctgctgcgccaggctatgctgcgccaacttcttcgcctcctacccctgagggttagtgccaagggtggtccaacggagctgagcctaaccaagagtgcctgggaggccagttcactgcgtagctcccggcacagtggcttcagccacttgtgaatgtgcccaaagctaggccaaaccattctgggctcaagggttcaagggcatagagtctcaaactcagtgtgcctagggtgctgcatcctgtgggtccgcaacactgtcacagcactggggggaaagaggcaccaccggggacgagtacagttcgaacgttggtcacgagatggcacagatacaggggatgctccaaacaccagaggtgggattccccaggccggaagcttgaagagcatgcgcacaatgctgcaaccttagttctaagattggggatctccgcaagtagagcaaagttctggattcacgtcccacctctgtcgccacagtagactcttgcaactgttctgttcattttggtctctgactctcccaagaatctcaacaccttgtacccacacagctttaaaaccc

SEQ ID NO: 258 - DNA, 997 bp, Rattus norvegicus
ccccaggttctttggtctccgacggcctttctacgcacacgcagccatgtcttccgacagacccgtggcactggtgactggtgctaacaaaggaatcggattcgcgatcgtacgtgatctctgtcgtaaattcttgggggacgtggtcctcacggcgcgggacgagtcacggggccacgaggcggtgaagcagctgcagaccgagggcctgagcccacgcttccaccagctggacatcgacaacccgcagagcatccgcgcgctgcgtgactttctgcttcaggagtacggaggactgaacgtgctggtcaacaatgcgggcatcgccttcaaagttgttgaccccacccccttccacattcaagcagaggtgacaatgaaaaccaacttttttggtacccaagatgtctgcaaggagctactccctataataaaaccccaaggcagagtggtgaatgtatcaagcagcgtgagtctcagggccctgaaaagctgcagcccggagctgcagcagaagtttcgaagtgagaccatcactgaggaagagctggtggggctcatgaacaagtttatagaggatgcaaagaaaggagtccatgcgaaagaaggctggcccaatagtgcatatggggtcaccaagataggggtgacagtcctgtccagaatctatgccaggaaactcaatgaggagaggagagaggacaagatcctcctgaatgcctgctgccctgggtgggtcagaaccgacatggcaggaccaaaagccaccaaaagcccagaagaaggagcagagacccccgtgtacttggcccttttgcctccaggtgcagaggggcctcacgggcagtttgttcaagataaaaaagttgaaccatggtgaatccaactctcacccccaccccttctatcctgacttggtgaaagccaagggacatttataatataccatcacttctggaaaaataaacataactaagtctttaagcacaaaaaaaaa

SEQ ID NO: 259 - DNA, 894 bp, Rattus norvegicus
catgtcttccgacagacccgtggcactggtgactggtgctaacaaaggaatcggattcgcgatcatgcatgatctgtgtcataaattcttgggggacgtggtgctcacggcacgggacaagtcacagggccacaaggcggtgcagcagctgcagacagagggcctgagccaacgcttccaccagctggacatcgacaacccacagagcatacgcgcgctgcgtgactttctgcttaaggagtacagaggactggacgtgctagtcaacaatgcgggcatcgccttcaaagttgttgaccccacccccttccacattcaagcagaggtgacaatgaaaaccaacgtttttgatgcccaagatgtctgcaaagagctactccctataataaatccccaaggcagagtggtgaatgtatcaagcagcttgagtctctgggccctgaaaaactgcagcccggagctgcagcagaagtttcacagtgagaccatcactgaggaggtgctggtggagctcatgaacaagtttgtagaggatgcaaagaaaagagtccacgcgaaagaaggctggcccaatagtgcatatagggtccccaagatagacgtgacagtcctgtccagaatccacgccaggagactcaatgagaagagaggggacaagatcctcctgaacgcctgctgccctgggtgggtcagaaccaacatggcaggaccaaaagccaccaaaagcacagaagaaggagcagagacccccgtgtacttggcccctttgcctccagatgcagaggtgcctcacgggcagtttgttcaagataaaaaagttgaacaatggtgaatccaactcttaccacccccccaaccccttctatcctgacttggtgaaagccaagggacatg

SEQ ID NO: 260 - DNA, 4269 bp, Rattus norvegicus
tctcggccgcggtgtttccgtttctctccctggttgtcgcctgctctgctcttctcatccttctcgctctgctgctctgcggagtgacgaggctgaatcttctccccacccagttcgcgcttttcttctttttctcgcgccgctccatttctccagtccggctgccgccgccactgctgctcagctggtgtcggtgccgcgcgtttcccccacgtcgtccccgcagcctatggcccaggccgccttgggtatttctgctcaaggtaaccacatccctctttaaaaattccgccgaaaaagagaagacgctttacccgactctttgggccgttatctcacggcgaactttctgaccgagtatacaactacccagaaggcctaggagaagtgctgtatagagagcagttcgattttaacgctgagccaccttgggaacctagctgatgataggggggttccatctcctaacttgtccatggaggtcttcacttcagaaacccaagactcacattcatccagcttggtgtcaagtgggctgttgctgccaggattatcttgtgattatatgaaagatgtatcagtttcttctgaagtgcagtcaactgtagaagcctttgtagcaggtgtgtaacaagtttgttgcatattctaaggacccagacataggcttggtggcccgtctcttgtttttcctggtttatgactttcggctttgtggaatacggctgagatgaaaggatttattgacgatgcaaactactccgttggcctgttggatgaaggaacaaaccttggaaatgttattgataactatgtttatgaacataccctgacaggaaaaaatgcattttttgtgggggatcttgggaagatcgtgaagaagcacagtcagtggcagaacgtggtggctcagataaagccattttacatggtgaagtgcaactccactccagccgtactggagatcttggcagctcttggaactggatttgcttgttccaccaaaaatgaaatggctttagtgcaagaattaggcgtatctccagaaaacatcatttatacaagtccttgtaagcaagcatctcagataaagtacgcagcaaaagttggagtaaatattatgacatgtgacaatgaagttgaattaaagaaaattgcgaggaatcacccaaatgccaaggtcttactacatattgcaacagaagataatattggaggtgaagatggtaatatgaagtttggcactacactgaagaactgtaggcatcttttggaatgtgccaaggaacttgatgtccaaataattggggttaaatttcatatttcaagtgcttgcaaagaatatcaagtctatgtccatgccctgtctgatgctcgatgtgtgtttgacatggctggggagtttggctttacaatgaacatgttagacatcggtggaggcttcacaggaactgaaattcagttggaagaggttaatcatgttatcagtcctctgttggatatttacttccctgaaggatctggcattcagatcatttccgaacctggaagctactatgtatcttctgcatttacgcttgcagtcaatattattgctaagaaagttgttgaaaatgataaattatcctctggagtagaaaaaaatgggagtgacgagccagccttcgtgtactacatgaatgacggtgtttatggttcttttgcaagtaagctttctgaggacttaaatactgttccagaggttcacaagaaatacaaggaagatgagcctctgtttacaagcagcctttggggtccatcctgtgacgagcttgatcaaattgtggaaagttgtcttcttcctgagctgagcgtgggagattggcttatctttgataacatgggagcagattctttgcacggaccgtctgcttttagtgacactcagaggccagctatttatttcatgatgtcactcagtgattggtatgagatgcaagatgctggaattacttcagatgcaatgatgaaaaacttcttctttgcaccctcttgcattcagctgagccaagaagacaacttctccactgaagcttaaacaggcattaacgcttctttagatctgaagtcgcaggttaagcttgtctggtctacattccagtgtggggaaaaattcaatcaatctttattctgttaattttcttggaaacaaattcatagtaatagctgtttgggaccagacaaaatcagctttcatctataattcattgggggtaataggggatttatttagataatgtatccagatttaaacataccagtttgacccaccccttaagcgtttaaaataaaatatgcaacaaaatggatgacttagtggagatggaagcccattaattgggttccccatcaaatcgtttacatacaagtacacagtttttataataaggattcctgttaaaagtcttgtaaagttgatgtctttcacccagatctatcacatgtgagtggaagaccagtgtgacttcattagatacgtttagtgtatttagagtgtgtaaatttgtgctttggactgtagtttaataaatgtaaaattgcatcatagtatttgttgtatttgacctaatgtaaccttgtatgattgcaataaaactttgtgtagattttaccattttttcaggctaaaaatttgggaatggggctagctagcaaaggtagttttgaactagttgtgtgtatggtctgttttgagagttttctttatagtccatttgtttggtttggctcaatatactttttagttatttaattagtaatttaagtaaaaagtgtttggtaatcattgtgaagttcagattcattatggagagtcgatgtgcagtaagcatgatgtttaacaattttaacaccagaaaatgttaatcttgcataaaccaattgtaataataataggtgtttctgtatagataggatgcatagagtaccttagtaaatctttgaatcacaaatcttttggctgatagaaaagattttattaaacactgaaaacttggtcggggatggggagagagactgcagaagactgcagaaccctaaccttaaagaagggctatgtctatttccagcatcctgatgccccttcgcacagacatttaaatcgagagggctttggggtggtgaagcacactcttcaatttctcacttgtaatggtatcaaattgcaatttttttgttgttgctgatcttggtttgaacctagtcccttagtttcttgttaattcccatttgttcaagcttagtaattcttccttccgtactaaagcttggtggggggtggggggaggagttagcttcactaacctgacactgttgccaggaattttggctttgttcactgctagtgtgttagtcctaagtctcagaatcacagaagtaatgagacaacttacaggggtcacttttcctaccttactctatgttcacaagtggaattcctgacctccaagaggaaatgtgacttcactttggtgccaatggacaggaaattctacctgtgctacataggagaagtgtgggatacacttgaatagctggattttacaccttgatttcaaggtggaaagaaattgatcatgaatctctaatttcaaatcaaaccagtaggtgcttaatatttttgatttgaatattgcccacttgaatatcatgggttctattaattataagaacaactaaggaccccagtccactgtcatctagttgcccttggacttttttccaaggtatactatggggtttatgcaaaatttgaagctaccatatgcattgttgtggtccaggaatgccaaaacttaaagcgtggtacaacctgagtccttggcctgactgtacaggcgtggtctctgtggcatcagttttgccttctgcataggagaaaggttgtatgtaacacagcccggaattgctatctcacatgtgaatgataggtaaacataagaatgtctgtattgtttttgaagactgtttgccataaatctaaagtcaaacctatgtatttcaatttggtatgcttaagaataattaatgtaaaatctttttatatgatattgtaatctcagttcaaatttaattgcaaatataaaacccaaatgatttctatatatagtaaattgaactgtcaaggtaacttgtgtgtgattctgaatacacagatacaatgtttttattcctcatgctttactttgatggcttctatcatgaaatagatgtgaaattttatgaaaaaaa

SEQ ID NO: 261 - DNA, 3324 bp, Rattus norvegicus
gaattccagtgcggctcgctcgccctgccggtgccatggcggccttcagcaagtacttgacggcgcggaactcctcgctggcgggggccgcgttcctgctgttctgcctgctccacaagcggcgtcgcgccctcggcctgcacggtaagaaaagtggaaaaccgccattacagaataatgagaaagaaggaaagaaagagcgagctgtggtggacaaagtgtttttatcaaggctctcacagatcctaaaaattatggtccctagaacattttgtaaagagacagggtacttgatacttattgctgttatgctggtatctcgaacatactgtgatgtttggatgattcaaaatggcacactgattgaaagtggcatcattggtcgtagcagtaaagatttcaagagatacttattcaacttcatcgctgccatgcctcttatctctctggttaataacttcttgaagtatgggttaaatgagctcaaactgtgcttccgtgtgcggctcactagatacctctatgaggagtatctccaagccttcacctactataaaatgggcaacctggataacagaatagcaaacccagaccagctgcttacacaagatgtagaaaagttttgtaacagtgtagttgatctttattcgaatcttagtaagccatttttagacatagttttgtatattttcaagttaacaagtgcaattggagctcagggcccggcaagcatgatggcctacttgcttgtttctgggctattcctaactcgactcagaagacccatcggtaaaatgacgattatggagcagaagtatgaaggagaatatagattcgttaattcacggcttatcactaatagtgaagaaattgccttttacaatgggaataaacgagaaaagcagacaatccactctgtcttccgaaaactggtggaacacctacataatttcattttcttccggttttctatgggtttcattgatagcatcattgccaaatatattgccactgtagttgggtacctggttgtcagtcgcccgttcctagacctggcgcatccgcgacaccttcacagcacccactcagagctgctggaggattactaccaaagtggaagaatgcttttgagaatgtctcaagctttggggcggatagttttggctgggcgtgaaatgactagattggctggttttacggctcggattacggaattaatgcaagtactaaaggatttaaatcatggcaaatatgaacgtacaatggtgtcacaacaggataagggtattgaaggagcacaagctagtcccttgatacctggtgctggagaaatcatcaatgcagacaacattataaagtttgatcatgttcctttagcaacaccaaatggagatatcttgatccaagaccttagttttgaagttcgatctggggccaacgttctcatttgtggtccaaatggctgtggaaagagctccctcttccgtgttcttggtgaattatggcctctctttggaggacatcttactaaacctgagagaggaaagttattttatgttcctcagcgaccctatatgaccctgggaacactgagagaccaagtaatatatccagatggaaaggaggatcagaagaagaaggggatatctgaccaagtgctgaaggggtacttggacaatgtacagttgggccatatccttgagcgggaaggaggctgggacagtgttcaggactggatggatgtactcagcggaggagaaaaacaaagaatggcgatggcaagattgttttatcataaaccccagtttgccattctggatgagtgcacaagtgcagttagtgtggatgtggaagactacatttacagccactgtcggaaggttggcatcaccctcttcactgtctcacacaggaaatccctttggaaacaccacgagtactacctgcacatggatggcagaggcaattatgaattcaaaaagatcacagaagacacagttgagttcggatcatagagaccatctggagaacttcacacttcacaagagaatgaatgaacagaatgcatttgtaaacaacgtgcattgtaaaataaagttaagcttgttttttttaaaaaaacaaagctacaaattgactagatataggataattgaaacatgttaaaacatttaatattgtataggatattgctaattgtgtatatgttggtttaattattaattatgtactaagaatgtccttattcttgtggttaaaaaacctgcctgaattaaattgggcttaaatcagtgtaacctgattcatgggatgtaaaccatttgaagtcagctaatttgacttttatagctctgtctttttctttaatgaagaaccctatttaaaactgggtcattagctgtttattctaacaaagtagtcttgagttcctttttgggtttttttttttttttttttttttttttttttgtgccccatggtagtgggaaccaaaccaatcacaatgttttattggaacatattccatcatcacaggatagcatttattaaacagtggcggatttctctagctgctacatttattctcattcctcatacataccttgaggtgcatttgattccaggagagccatttgggttttctttagctaaataataaatgtacccgtctcagtcttttggactgagtcgttctgaaggctctcgtgtggacagcagtgtgtgcagtctcttacagtccgtgcctgctccacatggtaccagtcttaccagtgcttgagagctcagacacaccctgctgcatgaagttggaggtctcgggagggttttagattttgtgacgggaaccggaaaggctcgtcagagtgtggctgtgtcatggtgagcaccacgtggctgtagaggcccgacatgaggtaatgcactgagcacacaacgccactgctgctgtctgtggctgtgggttcttaaaagtgctggactttgtcatgctcgtgggccaatgacatttcctaggagcggcctctgactcctgtgcagctgcgtctgtgtcagctctggctccctggaaccacgagtgactttgcacaaaggagggctgagagcggacttgatcagtaagtcgtcgtgaatcagtttgcttgagtgggctcggaatgggccttatcacgatggttttgtttcttcgtaactcataatcactggctaccaggataaccctgatgtattgattccgtgaatacatcacattcaatcttaccatgtctccttagcaaacgtgtgtacttattttctgttcagattaaaaaaaaaaaaaaggaattc

SEQ ID NO: 262 - DNA, 1993 bp, Rattus norvegicus
ccatgagctccattggcactgggtatgacctgtcagcctctacattctctcctgatggaagagttttccaagttgaatatgctatgaaggctgtggaaaacagtagtacagctattgggatcagatgtaaagatggtgttgtgtttggggtagaaaaactagtcctttctaaactttatgaagaaggctccaataaacgtcttttcaatgttgatcgacatgttggaatggcagtggcaggtttgttggcagatgctcgttccttggcagacatagcaagagaagaagcgtccaactttaggtctaactttggctataacattcctctaaaacatcttgcagacagagtggccatgtatgtacacgcgtatacactctacagtgctgttagaccttttggctgcagtttcatgttggggtcttacagtgtgaatgatggtgcacagctctatatgatcgatccatcaggtgtttcatatggttactggggctgtgccattggcaaagccaggcaagctgcaaagacagaaatagaaaagcttcagatgaaggaaatgacctgccgtgatgtagttaaagaagttgcaaaaataatttacatagtacatgatgaagttaaggataaagcttttgaactagagctcagctgggttggtgaattaactaaaggaagacatgaaattgttcccaaagacgtaagagaggaagcagagaaatatgccaaggaatctttgaaggaagaagatgaatcagatgacgacaatatgtaacatttcaccatcctctggtgtccatttctgtgacagttgcatatggctagcaccatggattatatatacccactgaccaattttcattaaattttgtcttataaacattgttgggtaattgaggatatctgcgttatattaaaatgtagattcatgtttgattagaaattctaggaactgggcctggagagatggctcagcagttaagagctgctcttccaggggacataggttcaattcccagcacccgcatggcagctcacacctgtttgtaactctagctccaggtctctgacacctagacacagaggtacttgcaggcaaaacaccaatgaatataaaataaaaataaatgatatatatatttacacatataacaagtatatacaaatatgtatattatacagacacatgtgtgtgtatatacatataaattcttggtgctattctggtgtggtagtatatgtctttaatcctagtactctggaggcagaggcaggtggatctcttgagttcaaggctagtatttaaaaacaaaaacaaatgtagtgcccagactaaggctgaaagattgagcccacaagtcaatttacaattccattttgttttaactagaattaaaagaataattttagattttttttttctttttttcagagctggggaccgaacccagggccttgcgcttcctaggcaagcgctctaccactaagctaaatccccaaccccttagatttatttttattttttgcatgtttatgtatattacagtgccatgcctggtgctcatggaggtcaaaagaatgctttaatctagaactaaagttatggaggactgtgaatcatgtatgttcgaaactgaacttgggtcctgtgtaagagcaacacgtcctcttaaccactgagccatctctccagccctctttgactagaatgatcatattctactgtggttcttgtataatgttttgtttaatgtagggatatcctgtaaccactattgaggactaacctgccttttgtggaaaatgtgacatattctaatttgacatcaatacagacaacatttattttcagactgcataaatatcttatgactggaaattatcttgatattggcacctgaaacaaaaacttaaaagttccaaactgggcttaaatatttcatgtaataaaatgtttatagtacttatctgaaaaaaaaaaaaaaaaaaaaaaaaaaa

SEQ ID NO: 263 - DNA, 1174 bp, Rattus norvegicus
ccgcagccttctttgacgatcaccgaaccgtagttgaggccgtgttcctgtgtccgctgctgtgtctggttgtaacctcgccggagctatgtttcgcaaccagtatgacaacgatgtcactgtttggagccctcagggcaggattcatcaaatcgaatatgcaatggaagctgtaaagcaaggctcagcgacagtcggcctgaagtcgaagacacatgcagtgctggtcgcgctgaagagagcacagtcagagcttgccgctcaccagaagaaaattctccacgttgacaaccatattggtatctcaattgcgggtctaactgctgatgccagactgttatgtaactttatgcgccaggagtgtttggattccagatttgtatttgacagaccacttcccgtatctcgccttgtgtctctaattggaagcaagacccagataccaacacagcgatatggccggagaccgtatggtgttgggctgctcattgctggttatgatgacatgggccctcacgttttccaaacctgcccatctgctaactattttgactgcagagctatgtccatcggagcccgttcccagtcagctcgcacttacctggagagacacatgtctgaatttatgcagtgcaatttggatgaactggttaagcatggtcttcgcgccttaagagaaacactccctgcagaacaggacctgaccacaaagaatgtttccattgggattgttggtaaagacttggaatttactatctatgatgatgatgatgtgtctccattcctggatggtcttgaagaaagaccacagagaaaagcacagccttcacaggctgctgatgaacctgcagaaaaagctgatgaaccaatggaacattaagtgataaaggttatgaggacatgaggatgcaggggcatacactggtgacaataatctgtattttaaaccaacagctgtaatgtattgggtggtatgttttagaaatcagtccaactgtgagttttctctaagcagcttcacagaaaccatataatggggtgcattttctttgaaagggtctacataatcattttctaggacgtataggtatctatatcaatgtttttatatgaagaaaataagtgtctttgcagttttaaagacaactgtgaaataaaattgtttcaccacctg

SEQ ID NO: 264 - DNA, 1850 bp, Rattus norvegicus
gaattccggttctagttgttgttttctctgccatctgctctccgggcgccgtcaaccatgggtccgtggacccactccttgcgcgccgccctgctgctggtgcttttgggagtctgcaccgtgagctccgacactcctgccaactgcacttaccctgacctgctgggtacctgggttttccaggtgggccctagacatccccgaagtcacattaactgctcggtaatggaaccaacagaagaaaaggtagtgatacacctgaagaagttggatactgcctatgatgaagtgggcaattctgggtatttcaccctcatttacaaccaaggctttgagattgtgttgaatgactacaagtggtttgcgtttttcaagtatgaagtcaaaggcagcagagccatcagttactgccatgagaccatgacagggtgggtccatgatgtcctgggccggaactgggcttgctttgttggcaagaagatggcaaatcactctgagaaggtttatgtgaatgtggcacaccttggaggtctccaggaaaaatattctgaaaggctctacagtcacaaccacaactttgtgaaggccatcaattctgttcagaagtcttggactgcaaccacctatgaagaatatgagaaactgagcatacgagatttgataaggagaagtggccacagcggaaggatcctaaggcccaaacctgccccgataactgatgaaatacagcaacaaattttaagtttgccagaatcttgggactggagaaacgtccgtggcatcaattttgttagccctgttcgaaaccaagaatcttgtggaagctgctactcatttgcctctctgggtatgctagaagcaagaattcgtatattaaccaacaattctcagaccccaatcctgagtcctcaggaggttgtatcttgtagcccgtatgcccaaggttgtgatggtggattcccatacctcattgcaggaaagtatgcccaagattttggggtggtggaagaaaactgctttccctacacagccacagatgctccatgcaaaccaaaggaaaactgcctccgttactattcttctgagtactactatgtgggtggtttctatggtggctgcaatgaagccctgatgaagcttgagctggtcaaacacggacccatggcagttgcctttgaagtccacgatgacttcctgcactaccacagtgggatctaccaccacactggactgagcgaccctttcaacccctttgagctgaccaatcatgctgttctgcttgtgggctatggaaaagatccagtcactgggttagactactggattgtcaagaacagctggggctctcaatggggtgagagtggctacttccggatccgcagaggaactgatgaatgtgcaattgagagtatagccatggcagccataccgattcctaaattgtaggacctagctcccagtgtcccatacagctttttattattcacagggtgatttagtcacaggctggagacttttacaaagcaatatcagaagcttaccactaggtacccttaaagaattttgcccttaagtttaaaacaatccttgatttttttcttttaatatcctccctatcaatcaccgaactacttttctttttaaagtacttggttaagtaatacttttctgaggattggttagatattgtcaaatatttttgctggtcacctaaaatgcagccagatgtttcattgttaaaaatctatataaaagtgcaagctgccttttttaaattacataaatcccatgaatacatggccaaaatagttattttttaaagactttaaaataaatgattaatcgatgct

SEQ ID NO: 265 - DNA, 4563 bp, Rattus norvegicus
gcctgctctccggcggagctgcgtgaggccaggccggcccccggcccccccttccggccgcccccgcctcctggcccacgcccgcccgcgctcggcccgccagcgcctccatccgggctggcggccccgcgtcgacgccgtccgccacctcgctgctaactcccgtgcagggcgccgtcggcggggcctcgctccgtcgggcctgcggatctccccaccgcctcctcctctatctacctcaacaccccattcctgcttcgccagaggaggcggtccccaccgcaggcagtccggcttgcaggtcgccggcgttgtcatcccccgcgctccccctcccagccctccccggcgcgcagcccggcagctcctctcttttcgctgcagtcccgagcagccgcggcgccgccacgcctgacccccccacaagaagccggggcttacgacggctgagggctccgtcggccctaaccgagctgggtgcccgtggccggggtgacgcctccattcctcccccctcaacaccgtcctcgatccttcgaagttgcatcctttcctctgcttagagtgcgccccccctcgcgcactcgcttacccgccacctttcctaggctcccctcctgccccctccccgttcctcctcgcctcagactccctccccctcacgtccgccctctgccttcgcctacccaagtggattaattatacgctttctgtttctctccgtgctgtcctctcccgctgtgagcctacccgcctctcgctgtcctctctccctctctccctctctgtgtcccccccctttcacgttcactctgtctctctcactatctctgccccccaactatccttgatacaacagctgacctcatttcccgatacctttcccccccccgaaaatacagtatctggcccgccccagccctaagataccctaaagaagcagaagagacgcccccctccccatcaaaaaaagccatctccccgttctgtcccgtcgcacattcggcctctgcgacttggacagagcggcgctggcagaggagtgcccggcagaagggccttcgcccgctgttcggtttgcatacccgcagcagggagatgggcggcagcgtcgccggcttccaggtaccaatggggatcccagtggggaagtcgatgttggtgcttctcatctctttggccttcgccttgtgctgcatcgctgcttaccgccccagcgagactctgtgcggaggggagcttgttgacacgcttcagtttgtctgttcggaccgcggcttctacttcagcaggccttcaagccgtgccaaccgtcgcagccgtggcatcgtggaagagtgctgcttccgcagctgcgacttggccctcctggagacatactgtgccacccccgccaagtccgagagggacgtgtctacctctcaggccgtacttccggacgacttccccagataccccgtgggcaagttcttcaaattcgacacctggagacagtccgcgggacgcctgcgcagaggcctgcctgccctcctgcgtgcccgccggggtcgcatgcttgccaaagagctcgaagcgttcagagaggccaagcgccaccgtcccctgatcgtgttaccacccaaagaccccgcccacgggggagcctcttcggagatgtccagcaaccatcagtgaaccaaattatgtggtaattctgcaatgtagtaccatcagtctgtgacctcctcttgagcagggacagctccatcatgtcccacactaaggtctctctgctccacttcccttcccaggtttctccccacccacccccatgccccgcctccccacatcaggctgctccccttgccccacaccatcgggcaaggggatcccagcaactcttcaaaaccaaatttgattggctctaaacaacccaattggcaccctccaaattatatatgaacattaaaaaaaaactttaaagcatatagtccctttacaacaaattggcttaagaaactccataactgataatctaaaaattaaataaccaaagaaattaattggctaaaaacatactaaaaattaattggcttaaaaacaattggcaaaaatcaaataatttggcccgcccccccccccttcatcttctttccatttagatctttagtcaaattggctcagacttggatctcagaacccaagaagaaaggaaggggacccaaaattttgcaggtagcatgtcattgcttcagtgctctctccttgtcactagtcacttttagcataatctggctgtgaacaacaatagccgcccaaactctttcttcactggtcattccatcacaaatgtcacccatgtcaccaaggggctgggtgaaggaacccaaggagaggaacagaacatgaaaactgaaaatagaacctaattggcacaagcccccagtcccaaaaatctcacttttcatacctactctaaaaagcacatgattatacccacacgtacatgcacacacacatgcacacaggcatgcatacacacacacacacacacacacacactattagatgagaacattgaaatggctgagcaacttcgattggaaccacattgcccaatccaaggcccatcttaaattccctgagcagtttgcatggtttgagctcctctctgaatccatctagtttctgctgccagtgtagagtcagtttggccagataaggagatggcactgccaagtgatacatgctacccgagtagcctgacccctaggtgtgctcctgggaggaaagatctgggggacaacccctaccccaagcacacctatgggccatctctgtcaatctcctggggagcccccactttttaggggctccccaggagactcacactgatgtggggagtgtgggaagtctggcggttggaggggtgggtggggggcagtgggggctgggtggggggaaactatgggtaggaagtggtcccagagaggtcttaggtggaacagtcaggaggaggcacaggtcaacttgcagaattactgaagaatcaggaccccaaattttctgtcaattgatctattcccctctttttatgtctggggcaggttttttccttttttttttttaatccctccttagcttttaatgcgctcataatcccattccctatgtaacgggggcagcgatcaagtaatgaatgcatcaagccatcaataccagcgagagccagtaacaccggctagagccatcaacaccggcttccaccatgtcctgctcccaaccatttatcaaccttttttttttttttatctgtctctatcgcttggcctgagttgggagtggagtctctgtggggtgctggccacgcacccacagagaaataaaaggaattgagaaggccgctacctggcctgacttctggggacagtggctggtccccagaagttctgaggagtggagggggcgtggggcagtgtcccctcaggtgttaggaaggtgctcggaggccacaaagatggggccccagctggccctgccagttgggggggaaggggatgtagatgtaagactagagaggttccatcaggcgggagcaagtggctgccttctgagcacttgggggaggtcctccccgtgcccctcagtgtcatcttgcccactcctcagcaccccatcttaccctcaggaggtctggagctctacagacctcctgggggcaaggtggggtgaggcctggagctggggaagcgaggaggctttaaagccttcagagccaggagaactgtgtacatggggttgtctgggccctggggcccgagggtctggtgagccgtagcagccactccacggtgcctaggactgcggcggggaacagggcggctggaggtttacctcacccccacttctgcttccagtgcagtccccctgcccaacagtcctactagtaatctagaggcctgaggcttctgggcccaggtgacaggactggcaccaccctgggggcggtgtgtgtcagccagccatggcacagagggttctcagcaagtgcctaaagaatgggccatttggaacattggacagaaactcaaagagtaaattgttataattggagaatatgaattggcctggtacccaaaatatctcgaggcaccctaaattacctgcccatttgactggacatccacccagtgttaatatgcctcgtgggatgggtgttttcaggggcatttgctgaccatcctctgtgtccccagatttgcagttctccccatcataggtcaccctgatgcaggcacctccctggcctcccatgcctagtgtggccctccatcttgttttgtctcttccctactgtcttcggtgggatcccctcttgggtcccccaatttgtcatcctgtgaagacttcccacgcgtcgaatgccatatgtcacctgtgccactgcccatgtcatccagcagtggccccgggtatttgccccaactcagtccttttaacatgcattttctggcaaaatccaaagcttgggttttgtttttaacctgttaacgcttgcaaacctaataaagcattcaaaatact

SEQ ID NO: 266 - DNA, 2441 bp, Rattus norvegicus
gatctggtcggtaccggagagcgcaggttgtatcaccaacatgggggactctcacgaagacaccagtgccaccatgcctgaggccgtggctgaagaagtgtctctattcagcacgacggacatggttctgttttctctcatcgtgggggtcctgacctactggttcatctttagaaagaagaaagaagagataccggagttcagcaagatccaaacaacggccccacccgtcaaagagagcagcttcgtggaaaagatgaagaaaacgggaaggaacattatcgtattctatggctcccagacgggaaccgctgaggagtttgccaaccggctgtccaaggatgcccaccgctacgggatgcggggcatgtccgcagaccctgaagagtatgacttggccgacctgagcagcctgcctgagatcgacaagtccctggtagtcttctgcatggccacatacggagagggcgaccccacggacaatgcgcaggacttctatgactggctgcaggagactgacgtggacctcactggggtcaagtttgctgtatttggtcttgggaacaagacctatgagcacttcaatgccatgggcaagtatgtggaccagcggctggagcagcttggcgcccagcgcatctttgagttgggccttggtgatgatgacgggaacttggaagaggatttcatcacgtggagggagcagttctggccagctgtgtgcgagttctttggggtagaagccactggggaggagtcgagcattcgccagtatgagctcgtggtccacgaagacatggacgtagccaaggtgtacacgggtgagatgggccgtctgaagagctacgagaaccagaaaccccccttcgatgctaagaatccattcctggctgctgtcaccgccaaccggaagctgaaccaaggcactgagcggcatctaatgcacctggagttggacatctcagactccaagatcaggtatgaatctggagatcacgtggctgtgtacccagccaatgactcagccctggtcaaccagattggggagatcctgggagctgacctggatgtcatcatgtctctaaacaatctcgatgaggagtcaaacaagaagcatccgttcccctgccccaccacctaccgcacggccctcacctactacctggacatcactaacccgccacgcaccaatgtgctctacgaactggcacagtacgcctcagagccctcggagcaggagcacctgcacaagatggcgtcatcctcaggcgagggcaaggagctgtacctgagctgggtggtggaagcccggaggcacatcctagccatcctccaagactacccatcactgcggccacccatcgaccacctgtgtgagctgctgccacgcctgcaggcccgatactactccattgcctcatcctccaaggtccaccccaactccgtgcacatctgtgccgtggccgtggagtacgaagcgaagtctggccgagtgaacaagggggtggccactagctggcttcgggccaaggaaccagcaggcgagaatggcggccgcgccctggtacccatgttcgtgcgcaaatctcagttccgcttgcctttcaagtccaccacacctgtcatcatggtgggccccggcactgggattgcccctttcatgggcttcatccaggaacgagcttggcttcgagagcaaggcaaggaggtgggagagacgctgctatactatggctgccggcgctcggatgaggactatctgtaccgtgaagagctagcccgcttccacaaggacggtgccctcacgcagcttaatgtggccttttcccgggagcaggcccacaaggtctatgtccagcaccttctgaagagagacagggaacacctgtggaagctgatccacgagggcggtgcccacatctatgtgtgcggggatgctcgaaatatggccaaagatgtgcaaaacacattctatgacattgtggctgagttcgggcccatggagcacacccaggctgtggactatgttaagaagctgatgaccaagggccgctactcactagatgtgtggagctaggagctaccagcctcccacccctcgctccctgtaatcacctaacttctgccgacctcacctctggtggttcctgcctggcctggacacagggaggcccagggactgactcctcctggcctgagtggtgccctcctgggcccctaggcagagcccggtccattgtatcaggcagcccagccccagggcacatggcaagagggactggacccacctttgggtgatgggtgccttaggtcctctgcagctgtacagaaggggctcttctctccacagagctggggtgcagcccccacacgtgattttgaatgagtgtaaataattttaaataacctggcccttggaataaagttgttttcagtaaatt

SEQ ID NO: 267 - DNA, 1329 bp, Rattus norvegicus
gggcggttcaaggcataacaggctcatctgggatcctctccagtcaggcttccttgtgcaagtgtctgaagcagctatggcaactgtccctgaactcaactgtgaaatagcagctttcgacagtgaggagaatgacctgttctttgaggctgacagaccccaaaagattaaggattgcttccaagcccttgacttgggctgtccagatgagagcatccagcttcaaatctcacagcagcatctcgacaagagcttcaggaaggcagtgtcactcattgtggctgtggagaagctgtggcagctacctatgtcttgcccgtggagcttccaggatgaggacccaagcaccttcttttccttcatctttgaagaagagcccgtcctctgtgactcgtgggatgatgacgacctgctagtgtgtgatgttcccattagacagctgcactgcaggcttcgagatgaacaacaaaaatgcctcgtgctgtctgacccatgtgagctgaaagctctccacctcaatggacagaacataagccaacaagtggtattctccatgagctttgtacaaggagagacaagcaacgacaaaatccctgtggccttgggcctcaaggggttgaatctatacctgtcctgtgtgatgaaagacggcacacccaccctgcagctggagagtgtggatcccaaacaatacccaaagaagaagatggaaaagcggtttgtcttcaacaagatagaagtcaagaccaaagtggagtttgagtctgcacagttccccaactggtacatcagcacctctcaagcagagcacagacctgtcttcctaggaaacagcaatggtcgggacatagttgacttcaccatggaacccgtgtcttcctaaagatggctgcactattcctaatgccttccccaggacatgctagggagcccccttgtcgagaatgggcagtctccaggggaagcctttgtcctctgccaagtcaggtctctcagagccataagaaaaccgtggcacattctggtcaaagaaaacgtgtgtttccctccctgcctctgacaggcaaccacttacctatttatttatgtatttattgattggttgatctatttaagttgattcaggggggtcacgaggcagcattgtcgacagaagaatctagttgtccgtgtgtatgggatgaattgaatttggaccagtgcacagccagcactgagttctttcattgatgctgaaaatgaagagtttcatattgtgtggatgagagtgtttatgaatgaagcacaagcacatcattttgatgagtatgaaataaatgtcactaaaac

SEQ ID NO: 268 - DNA, 1385 bp, Rattus norvegicus
cgcgacgcttcgctccggtgaaggggccactttttgaagaccgcgctgagatctccaaaagccagaggcgatcagagcaaccagacaccatcctcttcgttttgcattgagttccatttgcaaccgagttttctttcttttttttttctttttttccctcctcttcttctgatccctttgcagaatggattattttcccgtgatcttctctctgctgtttgtggctttccaaggagctccagaaacagctgtcttgggagcagagctcagcccccgagctgagaaggaagtgcagagcccccctcccagcacatcctggagaccccgcaggtccaagcgttgctcctgctcctccttgatggacaaggagtgtgtctacttctgccacctggacatcatctgggtcaacactcccgagcgcgtcgtcccgtatggactaggaagcccttctaggtctaagcgatccttgaaagacttacttcccacaaagaccacagaccaagggaacagatgccagtgtgctcaccaaaaagacaagaagtgctggaatttctgccaagcagacaaagaactccgagcccaaagtaccatgcagaaaggcgtaaaagacttcaagaagggaaaaccctgtcccaagctgggaaagaagtgtatctatcagcagctggtggagggaagaaaactaagaaggttggaggccatcagcaacagcatcaagacctcctttcgagttgcaaagttgaaagcggaactctacagagaccagaagttgatacacaaccgagcacattgactacagagccccgtggtgttttggaagccatgacttacatagagcgagccctatggccaactctgcgctctccatgctggctgggatcttagcaagaacatctgtccggcttctacagtttcttgttcagactggcagaggaccagcgtccttgttccaaacattccaagagaggttgaggtgttccctaacctgtcttcgtttgcatccgctggtagcaagtgattctcttgcctcttcttgctgtctggggatggcctcggacctctcggagagcagagacacagtgccattcctgagtggcatcatccagagagccaggagattccatagcagggcggagtttctgtagaaagtccttagggagtgttcgtgtctgactcaggcgcctggcacatttcagggagaaactccaaagtccatgcaaaaaattttctgaggaatgcacaaattgaaaacatactcgaaggacaaacacttgagtttttttttttttaaggacttttttttaagttgtaaaatgcaaaactcaaagcaactgttactactgtacattaggatatgtttcatgaatatgagtctacccaccttt

SEQ ID NO: 269 - DNA, 1623 bp, Rattus norvegicus
atccatcgtcccttcggttcctcggctcctcggctcctcggcattttccgccgttgggccgtatgcagctttcctctaaaccactgactgtaatttcccaggtttctttcagccacttccgggtcttccgtcgttccggaagcccgcgaattccggaagcgagggctacccagattcggctaggaaaagcccagcttgccagagaatgtttgagaaaagtttgcgcggcgctggtgtgttccgcagaccctgcagctcttgacaagtatgaggcaaaagcctcttgaagcagatgtgcagcagaattctccaccaccttttgataggccgctgagtgctgaggggaccacaggatccaaggaaagacagcatcagagaagatatggctgccagagaagagagtacacaaagtgccaacagagtgctgaggataagtcagctggatgcactggaactgaataaggccctggagcagctcgtgtggtcccagtttactcagtgttttcatggatttaagccaggactgttagctcgctttgagccagaagtgaaagcatttctgtggcttttcctgtggaggttcaccatctattccaaaaatgccactgtggggcagtcggttttaaatattcagtacaaaaatgattcttctcccaacccagtataccaaccaccaagtaaaaatcagaaactgttgtatgctgtgtgcactattggggggaggtggttagaagaacgatgttacgatttgtttccaaaccgacatttagcatctttcgggaaagccaaacagtgcatgaattttgtggttggacttttaaaattaggtgagttgatgaacttcttgatttttctacaaaaaggaaagtttgcaactttgacagaacgcctccttggcattcattctgtattttgcaagccccagagcatgcgtgaagttggcttcgagtacatgaatagggaacttctctggcatggctttgccgaatttctggttttcctcttaccgctcatcaatatccagaagttgaaagccaagttgtcttcctggtgcatcccccttaccagcactgctggtagtgacagtacactaggcagcagtggaaaagagtgtgctctatgtggagagtggcccacaatgcctcatactattggatgtgagcatgtattttgttactactgtgttaagagtagcttcctatttgacatgtactttacgtgccctaagtgtggcacagaagtgcacagtgtgcagccactgaaatcaggaattgaaatgtcagaagtgaatgctctttaaaaccaagttgtttcctctgaggaaagtgtattgtatccaattccttggaattcgtcatcttcagtgtcatctgtaggtggcttttagcaggagtgtgctgtgcggccactctcttcctttccaagcacaactcagttctaatcactggaaaccaagtgattctagagaatcttataaatcctcatgttattttttgatccctaatacaatttttaatgtcaagaataatggaaaattttgtcagatgaatactaagaatgactaagaatgctccttcatagaaaaaggtcagactctaaaaataaaacatttttgaggctctg

SEQ ID NO: 270 - DNA, 1016 bp, Rattus norvegicus
gacttcgaacctcattcggtgcagaactcctgtcccggtgacagccacaggtcacggccgccggctaagccgagccgcagcgcttggtagcaccttagggtgtctcgggagcaatcgcgccgggtccatggagaagccgcggggtgtaaggtgcaccaatgggttccccgagcgggagctgccgcggcccggggccagccgacctgccgagaagtcccggccgcccgaggccaagggcgcacagccagccgacgcctggaaggcagggcggccccgcagcgaggaggataacgagctgaacctccccaacctggcggccgcttactcgtccatcctgcgctcgctgggcgaggacccccagcggcaggggctgctcaagacgccctggagggcggccaccgccatgcagttcttcaccaagggataccaggagaccatctcagatgtcctgaacgatgctatatttgatgaggaccatgacgagatggtgattgtgaaggacattgacatgttttccatgtgtgagcatcacctggtcccatttgtgggaagggtccatattggttatcttcctaacaagcaagtccttggtctcagcaaacttgccaggattgtggaaatctacagtagaagactacaagttcaagaacgccttaccaaacagattgcagtggccatcacagaagccttgcagcctgctggcgtcggggtagtgattgaagcaacacacatgtgtatggtcatgcgaggtgtgcagaaaatgaacagcaagactgtcactagcaccatgctaggcgtgttccgggaagacccaaagactcgggaggagttcctcacactcatcaggagctgaacttccgtgtgcgagccccggtttgcagacccccgctgaggccagcgttatctgtctcgattgtacattccagttccagttggtatacttgtcaactttatttctcaccatgaattgtatttaataattatttatagagatgtcaaataaaggtgatcaactt

SEQ ID NO: 271 - DNA, 2851 bp, Rattus norvegicus
ggtaaagggctggccggccggtggtccagagctgtgctgtcatgaccgagggcacgtgtctgcggcgtcgtgggggaccctataaaactgagcccgccaccgatctcacccgctggcggctccataatgagttgggtcggcagagatggacttattatcaagcggaggaggaccctggtcgagaacagacggggctagaggcccactctttgggactggacacaacaagttatttcaagaacttacctaaagctcaaacagcccatgagggggccctgaacggagtaaccttttatgccaagctgcaggctgaggatggacactgggctggtgattatggtggtccactcttcctcttgccaggtctcctgattacgtgtcacatagcacacatccccctgccggctggatacagagaggaaatggtacggtacttgcgctcagtgcagcttcccaatggcggctggggcttgcacattgaggacaagtccacggtgtttgggactgccctgagctatgtgtctctcagaatcctgggtattggacctgatgatcctgaccttgtgcgtgctcggaacattcttcacaaaaaaggtggtgcagtggccatcccttcctgggggaagttctggctggctgtcctgaatgtttacagctgggaaggaatcaataccctcttccctgagatgtggctgcttcctgaatggtttcctgcacatccctccactctgtggtgtcactgccggcaggtctatctgcccatgagctactgctacgccactcggctaagtgcctcagaggacccactggttcagagcctccgccaggaactctatgtggaggattatgccagcatcgattggccagcacagaagaacaacgtgtgccccgatgacatgtacacgccacacagctggctgctgcacgtggtatatggactcctcaacctgtatgaacgtttccacagtaccagcctgcggaagtgggccatccagttgctgtatgaacatgtcgcagctgatgatcggttcacgaaatgcatcagcattggcccgatctcaaaaactgtcaacatgcttattcgttggtcagtggacggaccatcctcccctgccttccaggagcacgtctcgaggatcaaagattatctttggctgggccttgacggcatgaaaatgcagggcaccaatggatcacagacctgggacacttcatttgctgtccaagccctgctggaggcaggtgcacaccgaagacctgagtttttgccctgcctgcagaaggctcacgagttcctgcggctttcccaggtcccagacaacaatcctgactaccagaagtattatcgccatatgcacaagggtggtttccccttcagcacactggactgtggctggatcgttgctgactgcacggccgaggctttgaaggctgtgctgctcctgcaggagcggtgtccctcaatcaccgagcatgtcccccgagagcgactctacgatgctgtggctgtgttgttgagcatgaggaattccgatggagggtttgctacctatgagactaagcgtggcgggtatttgctggagctgctgaacccctcagaggtctttggagacatcatgattgactacacgtatgtagagtgtacctccgcagtgatgcaggccctgaggcacttccgcgagtacttcccagaccacagggctacagagatcagggagaccctcaatcaaggcctggacttctgccgaaagaagcagagagcggatggctcgtgggagggctcctggggggtttgcttcacctatggcacctggtttggcttggaagcattcgcttgcatgggacatatctaccaaaataggactgcttgtgcagaagtagctcaggcctgccacttcctcctgtcgcggcagatggcggatgggggctggggggaggactttgagtcctgtgagcagcggcggtacgtgcagagtgccgggtcccaggtccatagtacgtgctgggccctgctgggtttgatggctgtcaggcatcccgacatctctgctcaggagagaggaatcagatgtctgctagggaaacagctccccaacggagactggcctcaggagaacatctctggggtcttcaacaagtcctgtgccatcagctacacaaattacagaaacatcttccccatctgggccctgggccgcttctccagcctgtatcctgacaatacccttgctggccacatttgagcatgtgtgcgcctgtgcggcacctggccagcgtcagcactgtacaggcccaggcagcccggtttctcagctgggtgataagcgtcctcctagcccactttggcatggttctctatttctgtagacatgaggctggggatagggtcagagtcggtgtctagacactgggcagcatgcgctcggttctgacgctagcttcagtgaggaagggaagaagttgagcttgagatccagagaggcacagtgtactccgaggctcctgggtgtcctccttgagggaacaagactgtagagctttcatgatcagtgacttccctgtgagggagcagctggcttcttcacttcctcccttgttgactgtggagtgggccccgtggtgcaggcatgctcagagaaaggctcaatggaggaggcaggccccttgctcattgtgtcctgagcagtgtctgttgtcccaggcacttacccatgactgcatcactgcacgaaataccagttttccagaaaggaagtacaaactcgctctgtactaaaaatgctactaaaagtcgtttgaatgatcaccaactcccttaataaacagacccctgatggcccagtagtaaaca

SEQ ID NO: 272 - DNA, 1712 bp, Rattus norvegicus
ggccgctgcacctgcccggtcttgcgccgagaccgctgtcaatcgcggggcaccaggaataaaaggccccttgcagagatttgaaaatggccatgaacaaaagtgttggcctcttcagctccgcatccctggctgtggactacgtagattccctgctgcctgagaatcctctgcaggaaccctttaagaatgcttgggtctacatgttggacaactatacaaagttccagatcgcaacctggggctccctgatcgttcatgagacgatctatttcctgttctctttacctggctttctattccagtttatacctttcatgagaaagtacaagattcaaaaggataaaccagaaacctttgaaggccagtggaagtgtttgaaaggaattctgtttaatcatttttttatccagttgcctctgatttgtggaacatactattttacagagtttttcaatattccttatgattgggaaagaatgccaagatggtatttcactttggcaaggtgtttgggctgtgcagtcatcgaggatacctggcactatttcctgcacagactccttcaccacaagaggatttataaatacattcataaagtccatcacgagttccaggctccatttggaatcgaagcagaatatgcacatcccttggaaaccctaattcttgggactggatttttcattggaattgtgcttttgtgtgatcatgtaattcttctgtgggcatgggtgaccatgcgtttgctagaaaccatcgatgtgcacagtggttatgatatccctctcaacccgttgaactacatccctttttataccggggctcggcatcacgatttccaccacatgaacttcattgggaattacgcctccaccttcacgtggtgggacagaatctttgggacggatgtccagtaccatgcctacactgaaaagatgaagaagcttgggaaaaagtctgagtgagcacctgctctccgccctcctgactgcagctggcaactaacattgcttctggggagcagaactaagcacgtgactcggctgctggtgataggaacattaacaacctttaagtactctgcgggatgagaactcttctgctcgacacccaagatctgtaaatgtgggaacaaagaaatagatacataagtacagttttcaggaggaggttttaaaggccatattgccaacctcaccgaaaggtttcaggaacccgaggaagtgttaatgtacaactcaccacttcacgccacccgaggctgaagttgacgttgccttttaagcctttttacatacactggccatttcagaaaattctcaacaataatgtctgccttcgagtttaagtcatggtgttttttagaattgacttgaaatgaaaatatcacaaagtgaatatatcagctggtgatcgagtgactgaaacccccctggtctgcggttgaccagttcaggactattctttctgtgaaggattgtttgattgtagtatctttatcagcatcttgtaaattggctcatttcctacgtgatgtacatagaatactataacttaacgactttcaagttacttggggcatttttaaattgaggagccccacttctgatgtccacccccttgtctttgtgtgtcaggtggtctcggagctttgtgaattctctatctgcacctgtcagagctggtgaaataaatgtgatttttgtccg

SEQ ID NO: 273 - DNA, 2107 bp, Rattus norvegicus
gggctccgcgcaatgggccgagctggaggcgggggcccgggctgggggccgccgccagtgctgctgcttctgggggtcacgctggtgctcaccgctggggctgtaccggcacgggaagcaggcagtgcgatcgaggctgaagagctggtgaggagcggccttgcatgggagtcgcgtgccaatgacacgcgggaggaagctggcctgccagcagcaggggaagatgagacctcgtggacagagcggggcagtgagctggctgcggtgggccctggggtcgggccagaggagacactagaggcatcggctgcagtgactgggactgcctggctagaggcagatggcacaggcctgggtggagtgactgcagaggctggtagtggcgacgcccagacccttccagctacactccaggctcctgacgaggcccttgggtcatctacaatgccccctgccatccctgaggctactgaagccagtggacctccctcccccaccctccgtgataaacctagcctagtccctgaactccctaaggagatccccttggaagtttggctgaacctgggaggcagcacacctgaccctcaaaggccagagcctacttttccccttcagggcactctagagacacaaccagcctcagatataattgacattgattactttgaaggattggatagcgagggccgaggcacagacatgggcaggttcccgggctcaccaggaacctcagaaaatcaccctgatactgaaggagagaccccctcctggagcctgcttgacttatatgatgacttcaccccctttgatgagtctgatttctaccccaccacatccttctatgatgacttggaagaggaggaagaggaggaggaggataaggatgcagtgggaggcggagacctggaagatgaaagtgacctcctcctgccctctcagaagcctggtgtggggcctgggacgggacagcccaccagtcgatggcatgcagttcctccacagcatactctggggatggtacctggtggcagcatctctcttaggccccgccctggagatccaggcaaggacctggccacgagcgaaaatggaacagagtgccgagttggctttgtcagacacaatggctcctgtcggtcagtctgtgacctcttcccgagttactgtcacaatggcggccaatgctacctggtggagaacataggggctttctgcaggtgtaacacccaggactatatctggcacaaggggatgcgctgtgagtccatcatcaccgacttccaggtgatgtgcgtggccgtcggctcggctgcgttggtgctgctccttctgttcatgatgactgtgttctttgccaagaaactctatctgctcaagactgagaacaccaagctgaggaggaccaacaaattccggaccccatctgagctccacaatgataacttctccctctccaccattgccgagggctcccatccaaatgatgaccccagcgctccccacaaaatccaggaagctctcaagtcccgcctgaaggaggaagagtcctttaacatccagaactccatgtcacccaaactcgagggtggcaaaggtgaccaggatgacttggaggtgaactttctccagaataacctgacctgagacggaggagggagaggggagaggggggtgggggagggaaggaccgtggtctcctctcgggcagccggctcctcataaccatttgttaagcttttcctttgctgatctcatggcatgctctgatgtgttttgtaggagggggaaactcttaaaataagcaaagaaaccgagcagggttgcgtacattggatggttctcgtctgtgctctttgtacgttgcttctacagctgtgatttctaagcctatgctggcactcagctgacttgtttttttggttttttggtttttgttttttctgggtttttgttttgttttgttttgttttgtttctttgttttttggtttggtttttttttgtttgtttgtttttgtttttttgtactttgacccacctttttttggaataccagtttaaaaaaacaaaacaaacaaggttcttgaaataaaactttttaaaaa

SEQ ID NO: 274 - DNA, 5253 bp, Rattus norvegicus
gtccagggaggctcctccgcacgccatgtgcccgtgtccccggcatcgcggccgcgggcccccggccgtgtgcggttgcggcgacgctcgccccgggctgcgctgggcggcggcgcaggtgaccgcgctgcggctgcaggcgctgggcgacgagctgcaccgacgcgccatgaggcgtcgcgcgcggccccgggacccgctgcccgcgctgctgcccgcgctccgcgcccgctggccctggctgtgcgcggccgcgcaggtggcggcgctggcggcctggctgctcggcaggcggagcgcgtaggcggcgcgcgcggggccttcttggtgggggggaccggagccgagacccagcccggaccgagcaacaggttggcgaaaccctgtgtccttggaggaagctggttcctgttttcctgagggagtagcccggagtgcggaaggaagccaagagtgtacagagttgatggtgggaacgcgggcagaggaagcccctcgggaagtccagctgcagagatagccacctcagtgctatttacatagagctatatatatacaaaacaggagaaaaatacaaaattccgtatctgtgcatgcctgcgggggacgtggtccctttcctttccacgcaaccttgcgatgtgaactctgagactttgtgatgtctagggtggcaggggagagagatgcttgctgctgcgcgtgcagggaacttacgtggacctgtgggatcggcctcagtgtggaccaactgctcagcacagatgctggtgtggagtagagggaactcagcggccgaaggcaagatggacaagacagaggggacgtggggcccgttttgttgggggcagcctgggatccctccatttcttgacatgtcctagcctctcactgtccccgttgagtcagctctctagatctcatggcggtcatagccagagaaacgggatgtcattttctttccctacctacaagtgtgtctggtgcttctcttcacagtttcttggtgctaagtgtatccttcttggtacagacagagtcttacagacagaccgggaaggccaggggatgagacgtttctattttgctctttggatagactctcgttgcttttttaaaaaagggccaggtgacaagattgccactggaaagtctctctctggggggaggggtggtgctcacagggcttaagagcagcccctcccccagggggcagggctacgaaggggaggggcgggccttatacaggagctgctttggaggtggcagtccctcctctccctgcagcagcactctgggagactgctgtggactcctccaatttcctaaggggattcagggcttaggtttttgtagattcaagagccaagaaatagctgcgttctgacggagcgtgatttctaagcaggggatgtggggggaggggggcggaccgtttaaatgaaatgtccgatttcccctgctccccaaacacacggaataagctactgttttcagaagtttctagaagggctaatataaatataaatatatatacacaaatataacgaagctgagcgctagactgacatttggctgcagtggctcacggcttcaggactggtggctttttttttttttttttaaaggaacaggtattactcctctgcatggatactgtatcacacccccccccccccaggtctttgtagccgagatggtgagggatgcttgcttgggctcagtgagacagttactcttgtttttattttatctttttttttcctttctaattttggagacaaggcctcaccctggagcccaggctgacctcagctcatgagcctccctgccctgtatctggcatttgggactctgactaccaggggagcgtcattttctcctggctggatttgcaggtgacttgcctagtacctgggggatcagggtttctgctagaaagcatcggttgttcaggtgcgcagggcttcaagggaaccggtccctggccaacattgctgagtgtgatcagtaaaatgcaccctttcccagtttgtagtcaacaggctcctctctccattttaaatccatgccttatatttctctgaataacccacttaaaaaaaaaaaaacaaaaaaacaaaaaaacacaaccgggaactcaatgctgaagcctcccccttttatctgccagaaccgaagtcagcaaagaaaactaaataaaaggagagagcctgtctggcaggggaagcagcaggcagcaggccatgccctcgcccagccagaattacacagaatgatctggaagacaccctctgcttgtgttgagtccctttcccagcaaggaaacaagtccttgcaagcatcacatttcaacatggtgggactctgtggtgtcagcctctttaaagacacacggtccagatcacagcggggggcgcgctgaccctggagagacccagcgcaaagggtgaggggtgagagaaaacctctctttctgtgttttgctttctgagcctggctttgcctgttagctagtgatagctccctggaggatttgaactccaaacacaggggttagcctctctggtcattttcatttcaatgaagctgtgttgccgagagagccgggcaccctgtgaccttcctaatggaacttctcagccaagtcctctgtaaatactctcccgtagtaatggaaaccacgtatttgtcgaatctgggccttggctcgcacgctgttcatttgagtgtgcttctcctgccccgggtttgatggggttgttttttaaatgcctgttttttctatgagatctgacttcttgatggacatttgtattagaatattgaagcatgctggctgtgtcactgttgtctcactgtctctgccgtggtgttacttggactgcatgagataatgggacagcctttctgttattggtgttattgaaaaaaaaaaaaacaaaaaaaacccaacccaacttccacagtgtgtgaagctctggcacaatctccctctctttatcctgctctccctggctgccaaggagcattgattttgattcgcttctatgtagagtctgtgaagagggagagaggctttgaaataaattttaaaaagacctcatactgggtttcagcagacagcagtgggtatgtgtgtgtgtgttcgtgcatgtgagtgtgtgtgcatccatccgactgggaggcctctgagatcattgctaaggagctggttgtgtgaggagctgaggcgccacccgggtctaaaagctgctggctgctctctgagggggagtcctgggagtctgtgggactgaagccttctagagtaggtccactcccttctggaagcttctctccctcacttcatcccccacaagcaagagctctgcccacatttggggttcaatttccctttgtctagatggagtttgagccagagttcttttggagagcccaggaaggactgtgcccactgtccacagtcctgggctgggaggccatgcccccccattccctgtccctctccacaccccatttacagttaccctggagactgcctccccacttctgtgatagccttgttctgtttcctttctaccttgatgggggatactgactgaagcctagtgtcacaggataacgaggccttgaatggcctgatgatactctttagatctgagctcatgtcctgtatgccacctgactgtactgtcatgtttctaaaattgacaaagtgtcattcttgctcactgagaactgggggagggggcagatccacgcatgagctccccaggtatctctgggagaccctgggtcactattggggacgacggcttgtttttgttattactattattgttttctgagacacggagccaggctggccttgaactctctatacagcagaggatagccctgaactcctcatcctcctgcctccacctcctgattactggaatgggccgattactggcttttgttgtggactttttggatgtccaccgtggactgttagaacacaagtctctcccgggttcatgctgttttcttttctgagcctgaagtcaacttggggagagcagggggtcagaaggtgctggggattcggggagaggggccgcagcctatttccacaggagctggtccgaagccccaccaagagggaaagcgtacatcacagtgtctcttgaaagctttagccaaaagtttatctttttgacattttaatgtattcactcgatgcttatttactgaacatctaccgtgtaccagctgaagacctccacgtctgagcaaagtgacttagttatggtacagcaacagtcctttttggagaccagatgccgtgaaatgtccctttccagtctggctcataatttagaacagatctgccgggtcaccattgtgaccccaagccttgctggcagattgctatatagtattttctgcatgccactctctgggctgaatgcaattaaaaattttgctacgttgtctccttctccactgagaggattggtcccttttgtacaataatcaacaccccccacacacacacacacaggagcacggccactgaacactgcaggaggcgcttcccaaggcttcccctgagagagccccatcctattggttagtaccactgatcccattttacaggcgaggaagctgagggcacccaaatggcaaactaagggttgcatttgagttcgtgccccccccccacaagccaatgtggtgcctgctctggtgtcacccatttgaaaagcaagcattatgggtgaaggcaagatattctaggtcaaaggcagacattgctagtctaagggcagggacaaacctgtggcccagcagggagtgtctactttagctgaaaagaaagcaagccttatttggggacacttgagagcagaaggttgtctccagttttagaaacctccagggtaaggggtatctaatgtgcaaacggactgtcccaaccattctggaggccctggggagtctcccacccctctctcctctatctcctctcccaaccctggatccccaaggtctttgcactggaagagtcaaggagccggtatggatggcagaggtggctgtgagggcatttggagactgggggagaggcagtaacttggggggacattctgtctgggtcctgacccttgttgccttgtgctcttttgtaaggggtggggggctccctgcctggatgctttgtacatatttgttacacttttattaaaaaattgatcgtgcacctct

SEQ ID NO: 275 - DNA, 1870 bp, Rattus norvegicus
gaactggagcagagaggacagagaaaacacctttaatgaacttggaccccaggaattgaccactggtgagcactgtgatgcttcatagacagccaaccataaaaaagaagaactttacaccatttttgtcattctgaaagactataaaaccagagtccaatctccatcatcatacaggaagccaagaacttcctactaggttgggaccttgaaccttgaattcataaagactctcaaaggcccagaaacaaagcctctgtggacaaagtactctggaaacacagactcattgtctttgatagaaaagtaaatacagaagctattgttcctgaccagttcctcatcaaaggatggagatttcaaatatcacagaaacctaccccacaaccacagaatatgactatggggactctactccatgccaaaaaactgatgtaagagccttcggggctggactcctgccccccctgtactctttcgtgtttatcattggagtggtaggcaatatcctggtgattctggtgctcatgcagcataggaggcttcaaagcatgaccagcatatacctgttcaacctggctgtctctgatctggtcttccttttcactttacctttctggattgactacaagctgaaagacaactgggtttttggtgatgccatgtgtaagcttctctctgggttttattacctgggcttatacagtgagatcttctttatcatcctgctgacaattgacaggtacctggccattgtccatgcagtgttttccctgagggcccgaactgtcacttttggcatcatcaccagtattattatttgggccctagccatcttagcttctattcctgccttatgctttttcaaggcccagtgggagttcactcaccatacctgtagccctcatttccccgatgagagcctgaagacgtggaagaggtttcaggctctaaagctaaacctccttggactaattttacctctgttagtcatgataatttgctacgcagggatcatcagaattctgctcagacgacccaatgagaagaaggccaaagccgtgcgtctgatatttgctattacgcttctattcttcctcctctggaccccctacaatctgactgtatttgtttctgctttccaagatgttctattcaccaatcagtgtgagcagagcaagcagctggacctggccatacaggtgactgaagtgattgcctacacccactgttgtgtcaatccaatcatttatgtctttgtgggtgagcggttccggaagtaccttcggcagctgtttcaaaggcatgtggctataccgctggcaaaatggctgcccttcttctctgtggaccaactagaaaggaccagttccttaactccatccacaggagaacatgaactttctgggggcttctgattcagaccctaggtgtcaaccaaggtctagaggagaatgagggggatagtatatagctctccaagacagatactgacagctattacagtggggattcccagtcttgtagggtcaaagggaactttgaggtcgcttaggtacaagtcacctattcaatggtttccttgaacttctctctgttaaaaatgagatgaataaacaaagtgggacattatagaaatggggataatgagtggcttgggcccaacaagtgatggatctgtagttattaacctaaaaacaaaaccactacttttactgaaatcaacacctaatgatgtgatattctgagaaaaatttaaagcattgtaataaagaattttgtgtattttcatattgacatatattataaagtagatgttatgtcaaaattaaaactgtagcaaactaaaaaaaaaaaaaaaaaaaaaaaa

SEQ ID NO: 276 - DNA, 684 bp, Rattus norvegicus
acgagtgctgacatgatcactctctgtgttcacaggaaagcgcatttgtcttggcgaaggcattgcccgaaatgaattgttcctcttcttcaccaccatcctccagaacttctctgtgtcaagccatttggctcccaaggacattgacctcacgcccatggagagtggcattgcaaaaatacctccaacgtaccagatctgcttctcagctcggtgatcgggctgaggcagccaggtgccccagttctgttgggaatggcctcatgtttctgcctctgggggacctgctgaaaaccaggctccaaggccactgctccacatcttcctattgcagttctccaaagtcccaaggcttgttcttattcctgtgaatggcactgaagaagtcaatcgactgtcttattttgacatgtgacagagatttcatgagtacacatctcatgctgagtcacttccctcttcctcctaatagcccacgtccccacttatcagccctccatggtctgtgatctgtgctaatggactctgtatatggtctcagtgctatgtctacagacttacatagtatgtatggttcaggtaaacagaatcacagagtgtgtgagcttcggtgtgttgtgcctttacttcacataatattatctaggttcctgtgttctacaggccacagtcacacacattcat

SEQ ID NO: 277 - DNA, 1554 bp, Rattus norvegicus
ctgggagcaccggtcacccagacactatgaattggtccttgcaactccggagtttcattctatgctgggcgcttttactactttctccaacgggcctggcacagtacactgctactagagataactgttgcatcctagatgagagattcggtagttactgcccaaccacttgtggcatctcagacttcctgaattcttaccaaaccgacgtggacactgacctccagactctggaaaacatcttacaacgagctgaaaacagaaccacagaagccaaggaactgattaaagccatccaggtttactacaacccagaccaacccccaaagccgggtatgatagagggtgccactcagaagtctaagaagatggtagaagaaatcttgaagtacgaagcactgttactaacccatgagtcgagtatccggtatttacaggacatctatacttcaaataagcagaagatcacgaacctgaaacagaaggtggcccagcttgaagctcagtgccaggagccttgcaaggactctgtgcgaatccatgacacaaccggaaaagattgtcaggatatcgccaacaagggtgccaaagaaagtggactttacttcattcggcctttgaaagccacgcagcagttcttagtgtactgtgaaatcgacggatctggaaatggctggaccgtattgcagaagaggcttgatggcagtgtggatttcaagaagaactggattcagtataaagaaggatttggacacctgtcacctactggcaccacagagttttggctgggcaatgagaagattcatctgataagcatgcagtccaccatcccatacgcactgagaatacagctcaaagactggagtggcaggaccagcaccgcggactatgccatgttcagggtgggtcctgaatccgacaaataccgcctgacctatgcctacttcattggcggagatgccggggatgccttcgacggctacgattttggtgatgatcccagtgacaagtttttcacatcccacaacggcatgcacttcagtacctgggacaatgacaacgacaagttcgaaggcaactgtgctgagcaggatggatctggctggtggatgaacaagtgtcacgctggccacctcaatggagtttattaccaaggtggcacttactccaagtcatctactcctaacggttatgacaatggcattatttgggccacctggaaaacccgctggtattccatgaaggaaaccaccatgaagataattcccttcaacagactctccattggagatgggcagcaacatcacatgggaggatccaaacaggttggagacatgtaaagaacatttccaaggtgatttgctcttttaacggactttatccaagcagagagatatatttttcctatgagaccatggaacctcacttcctttacagagttaatgggatccatgatgcaaactccattagcagttttatgctggcgataatttatctacatgcatttcaataaacattttgtttcctaaaaaaaaaaaaaaaaaaaaaaaaaaa

SEQ ID NO: 278 - DNA, 435 bp, Rattus norvegicus
ccatttgctcagtctaaaagcaaactgagcaccatgaggctgagcctgtgtcttctgaccattctggttgtttgttgctatgaagctaatggccagaccttggcgggcgtctgccaagctcttcaggatgtaactataaccttcttactaaaccctgaggaagaactgaagagggaacttgaggaatttgatgcacctccagaggctgttgaagcaaacctaaaagtgaagcgatgtataaataagataatgtatggagacagactttcaatgggaacttcattggtattcactatgttgaaatgtgatgtgaagtatggttacaaataaactttccaagaggtcgttggttctcagaaattaactgactttcactgctcaatgtgaaggtttcaatttcttgcacctaataaattactctccttgcatattaaa

SEQ ID NO: 279 - DNA, 306 bp, Rattus norvegicus
atgcagccccgaatgctcctcatcgtggccctcgtggctctcctggcctctgcccgagctgatgagggagagggatccttgctgctgggctctatgcagggctacatggaacaagcctccaagacggtccaggatgcactaagcagcatgcaggagtctgatatagctgtggtggccagcaggggctggatggacaatcgcttcaaatccctgaaaggctactggagcaagttcactgataagttcactggcctctgggagtctggccctgaggaccaactaacaacaccaactcttgagccgtga

SEQ ID NO: 280 - DNA, 1211 bp, Rattus norvegicus
ggcggacagaaagagtccaagcccttcccttgaagaaccctggtaagagtgatggtccaagttttctggtcatatttatggagagtctcggcaccccaaatgacaccctctagtgctgaaggtggaagaaaaatggaagctggtggctgtgtctgtggaaaacacaatgtggagccgtatagtgactgggacagcttgtcgctcctggcacccaaggcaattctgactgtatctgtctgtctgctctggagagcctcgcaaaaatctcaccacctccctgcagcttctaagtgccagattgtgccccacaccctcaggagccatgctgctgttggtgaccctggctctccttgccggccccacctgcagagcccagacatccagctgcggtttggtggtaactggagtgacgtgtacggatcccggtcactaaaatataaagagttccttctggaggatggagagcacgtgacacaggtgagcggcaccagaaagctctgcctgacttccctgagcttcactactaacaaggggcgagtggtcacctttggtgttagacgtggcttgtcctttaatgaaagtggaggttcagataagtatctagtgactgtcaatggtctgtatgcaccgggcctctgccttaatgggatgggcttcaaatggaaaaatattcatgatgactttgacgacaatgatgatgacaaggaagatgatgatgatgaacatgatgatgacaatgaggaagaccatggtgataaagacaatgacaacgatcatgatgatgaccatgatgatgatgatgatgacaaggaagatgacaacgaggaagatgttgatgatgaaagagatgacaaagatgatgatgaggaggacgatgataatgataaggaaaatgacaaagacgatggtgagggcagtggggatgatgatgacaatgatgatgaagatgatgacaaagatgatgatggtggtagtggtgatgatggtgatgatggtgatgatgatgaggatgatgatggtggtgatgatgacaatggtgatgaggaagaagagtagcatgttcagagctcagccctgcatccccgcattccaccacctcctctcagccaagcttacccactcacagggaccaatagaccaggtgaccctgggctggagtaggcaaagtcaaatgccctttatctctctgtccaataaagcatgtgcattct

SEQ ID NO: 281 - DNA, 1501 bp, Rattus norvegicus
cagggtcgtcctggcaaccagctgctcagccaatcagcgcttgacactacgatccgcccccaacttctggagccatggcggtgagaagagccctgattgtattggcccacgcagagaggacatcattcaactatgccatgaaggaggctgctgtggaggctctgaagaagaaaggatgggaggtggtcgaatctgacctctatgctatgaactttaaccccctcatttccagaaacgacatcacaggggagccgaaggactcggagaactttcagtaccctgttgagtcatctctggcgtataaggaaggccgcctgagcccggatattgtagctgaacagaaaaagctggaagctgcagacctggtgatatttcagttcccattgtattggtttggggtgcccgccattctgaaaggctggtttgagagagtgcttgtagcaggattcgcctacacgtatgccaccatgtatgacaagggtcctttccagaataagaagaccttgctttccatcaccaccgggggcagcggctccatgtactctctgcagggtgtccacggggacatgaacgtcattctctggccaattcagagtggcattctgcgcttctgtggcttccaggtcttagaacctcaactggtgtacagcattggccacaccccacccgatgcccgcgtgcaggtcctggaagggtggaagaagcgtctggagactgtctgggaggagtcaccactctactttgctccaagcagcttgtttgacctaaacttccaggcaggattcttactgaaaaaagaggttcaagaggagcagaaaaagaacaagtttggcctttctgtgggccatcatttgggcaagtccattccagccgacaaccagatcaaagctagaaaataaggttttccataccatgtagttagacccaggtttctttttccccagcttgcctggcttgctttcagttttcgcctttgttccacaaggataggaaaaggaggaggctcgcctcatgcgtttttggatagttctgccacggcgtgtgacagcaaaatgaacgaggtcagattaggggcctcaggtggcctgggatatgaatcagggagaggtgtagccgcgagcggggaaaatactcttctaggtcttttgtacactataagcttttttcttcgggctagcctggctaaatggcatccaatcctccacccacttgttgctattagttacctctctgtggtttagggcaggagggaattgctcaaacaatggctgagggactaacttgtttagcagttagctaaagcctgtttatgatccatcctggtttcaattactgtgcagtgactgacaagcctcgggggattgctctccagctcttctctgccttgtacatagcacacccaggtcctgggaaatgaatacaaaaacaggtctccgcctcattcttgctattctttctttgtgtgtgtgtgtgtggaaataaatggatatttcacacgtca

SEQ ID NO: 282 - DNA, 948 bp, Rattus norvegicus
aacagctagcggagcggcaggaggagcactaaccaggaaaatggcagacggcttctcacttaatgatgccttagctggctctggaaacccaaaccctcgaggatggcctggtgcatgggggaaccagcctggggcaggaggctacccaggggcctcctatcctggggcctacccaggacaggctcctccagggggttatcctggacaggctcctcctagtgcctatccgggcccaactggccctagtgcttatcctggcccaactgcccctggagcttatcctggcccaactgcccccggagccttcccagggcaacctgggggacctggagcctaccccagtgctcctggggcctaccccagtgctcctggggcctatcctgctactggcccctttggtgccccgactggaccactgacagtgccctacgatatgcccttgcctggaggagtcatgcctcgcatgctgatcacaatcataggcacagtgaagcccaacgcaaacagtatcactctgaatttcaagaaagggaacgacatcgccttccactttaacccccgcttcaatgagaacaacagaagagtcatcgtgtgcaacacgaagcaggacaataactggggaagggaagaaagacagtcagctttcccctttgagagcggcaaaccattcaaaatacaggtcctggttgaagccgaccacttcaaggttgcggtcaatgatgttcatctgttgcagtataaccatcggatgaagaacctcagggaaatcagccaactggggatcattggtgacataaccctcaccagcgcttcccacgccatgatctaagccagaaggggtgggccggcaccagaactgccctgtgtgttatgagcgggaaactttgcatttctctctccttatacttcttgtaagacatccatttaataaagtctcgtgctgagaga

SEQ ID NO: 283 - DNA, 1425 bp, Rattus norvegicus
gaagcgatcactgagtggcggcggctgctgattgtgttctaagggtcggagtggggtcgacgtttgctctaccggaacagcttagctcattcctccccttccattacccgtggcgcggaggcttggggcggcggctgcgtcagcaagggcggtggcggcggcggcagctgcagtgacatgtccagcatgaatcccgaatatgattatttattcaagttactcctgattggcgactctggggttggaaagtcttgccttctccttaggtttgcggatgacacgtatacggaaagctacatcagcacgattggtgtggatttcaagatacggactatagagctagacgggaaaacaatcaagcttcagatatgggacacagcaggccaggaaagatttcgaacaatcacctccagttattacagaggagcccatggcatcatagttgtgtatgatgtgacagaccaggagtccttcaataacgtgaaacagtggctgcaggagatcgatcgctacgccagcgaaaatgtcaacaagttgttggtagggaacaaatgtgacctgaccacaaagaaagtagtagactacacaacagccaaggaatttgcagattcccttggaattccatttttggaaaccagtgctaagaacgcaacgaatgtagaacagtctttcatgaccatggcagcggagattaaaaagcggatgggtcctggagcaacagctggaggtgcggagaagtccaatgttaaaatccagagcactccagtcaagcagtcaggtggaggctgctgctaaaatccgcctccgtccttttctcacagcaatgaattcgcaatctgaacccaagtgaaaaaacaaattgcctgaattgtactgtatgtagctgcactacaacagattcttaccgtttccacaaggtcagagattgtaaatggtcaatactgactttttttttttattcccttgactcaagacagctaacttcattttcagaactgttttaaacctttgtgtgctggtttataaaataatgtgtgtaatccttgttgctttcctgataccagatcgtttcccgtggttggttagaatatattttgttttgatgtttatattggcatgtttagatgttgggtttagtcttctgaagatgaagttcagccattttgtatcaaacagcacaaccagtgtctgtcagtttccatgcataaagtttagtgagacgttatatgtaagatctgatttgctagttcttcctggtagagttataaatggaaagattacactatctgattaatagtttcttcatactctgcatataatttgtggctgcagaatattgtaatttgttgcacactatgtaacaaaactgaagatatgtttaataaatattgtacttattggaagtaatatcaaaaaaaaaaaaaa

SEQ ID NO: 284 - DNA, 924 bp, Rattus norvegicus
cctggtggttccgcagccgtactctcctggcctggtgtgcacagcctcaccatgagttcttctgcagccagcccgcttttcgcgcctggcgaggactgcggccccgcgtggcgcgcggcccccgcggcctatgatacgtctgacacgcacctgcagatcctgggcaagccagtaatggagcgttgggagaccccctacatgcattcgctggcggctgctgctgcctccagagggggccgggtcctggaagtgggctttgggatggccattgcagcctccagggtgcagcaggcccccataaaggaacactggattattgaatgcaacgatggggtcttccagcgtctacaaaactgggccctgaagcagccacataaggttgttcccttgaaaggcctgtgggaggaggaggcacctacactgcctgatggtcactttgatgggattctatacgacacatatccactgtctgaagagacctggcacactcaccagttcaactttattaagactcatgctttccgtttgctgaagcctgggggtatcctcacttactgcaacctcacgtcctggggggaactcatgaagtccaagtacacagacatcactgccatgtttgaggagactcaggtgcctgcactgctggaagctggcttccagagagaaaacatctgtacagaggtgatggcgctggtgcccccagccgactgccgctactatgccttccctcagatgatcacacccctggtcaccaagcactgagcggctggcccagggctacaaggagaatatgtcctcctcagtgcctttgtagctggagtgtggctccagcctctccactatccctgcagtgtgacatcctaacctctgcctggtacggccatctccccagagctcaggagtaaaataaatgctaccaagact

SEQ ID NO: 285 - DNA, 4507 bp, Rattus norvegicus
cgcgccgcctcggggccaccgccaggctccagcgctccggttcaagaggagccacactggggagtcccaaggaagcagccaggcagatggggagcccaggatccgtggtttccctctccttagtctgctggaggacgcgcgtggtggtaccaagttccacacatgacttaatgaataagggaatgccagagctgaagaggacccagcatgactactaacctatgactcctaacagtatgacagaaaaatgccttccagcctgggacaaacagaagccccatccagaccgaggccaggactggaagctggtaggaatgtccgaagcctgcctgcacaggaagagccatgtggagaggcgtggtgcattgaagaatgagcaaacatcctcacacctcatccaggccacttgggcgagctctatattccatctggatccagacgatgtgaacgatcagagcgtctcaagcgcccagactttccagaccgaagagaagaaatgtaaagggtatatccccagctatctagacaaggatgagctctgcgtagtgtgcggggacaaagccacggggtaccactatcgctgcatcacctgtgaaggctgcaagggtttctttagaagaaccattcagaaaagtctccatccatcttactcctgtaaatatgaagggaagtgcatcatagacaaagtcacccgtaaccagtgccaggaatgtcgctttaagaaatgcatctatgttggcatggcaacagacctggtgctggatgacagcaagaggctagccaagaggaagctgatagaagagaaccgtgagaagaggcggcgggaagagctacagaaatccattgggcataagccagagcccacggatgaggaatgggagctcatcaagacagtcaccgaggcccacgtggccaccaatgcccagggcagccactggaagcagaagcggaaatttctgcctgaagacattggacaagcacccattgtgaacgccccggaaggtggcaaggttgatctggaagccttcagccattttacaaaaatcatcacaccagcaatcaccagagtggtggatttcgccaaaaagttgcccatgttttgtgagctgccctgtgaagaccagatcatcctcctcaaaggctgctgcatggagatcatgtccctccgagctgctgtgcgctatgacccagacagcgagactctaaccttgaatggggaaatggcagtgacacggggccagctgaaaaacggaggtcttggggtggtgtcagatgcgatctttgacctgggcatgtctctgtcgtctttcaacctggatgacacggaggttgccctgcttcaagccgtcctgctgatgtcttcagatcgcccagggctagcttgtgttgagagaattgagaaataccaagacagtttcctgttggcctttgaacactatatcaattaccggaagcaccatgtgacacacttttggcccaaactcctgatgaaggtgacggacctgcggatgattggagcgtgccacgccagccgcttcctgcacatgaaggtggagtgccccaccgagctcttcccgcctctcttcttggaagtctttgaggactgaacggactggacaggttcttgtcattcctgcagcacgactgggtgtcgctgcattccacctgtagctctttctgttgtcgtttcttcgtttctttgtgtcaagtgagctcatcagtgggtcagcgggtcatcagtggcatagacttggatgaagtggtcctttgaatgtgggtctttgtaaccattgcgtttcgttctccagtccttagtgtgacggctttgaggggttcacagcagtgcaggccgagtgggggcgatcatctcaccagcaccacgtcgtcaccagctcccatctgtccctgggcagactcaagcaagccaaatggcattacagaagactaaagaagccttaaaaccgagacgacagtcatcttgatccaatgcgatccagttctgttgtttgtaaggtgaagctggcagagctcaggccacctcaggttgggcgtggcttttggcgcgtgaggggaggagccgttccagcttcaggaactcacagctactcaggagcttaccgcttccagcacccttactctccaagcaggctgacttggaatgtgcaggatacccacaccataacaaatcgacgttactttccatggccttctgtaaccttgtgatttacttcaagttgcgcaagagtagaacttggagacttgactggtttgaggccacaaggaaagtctccttttcaggatgcccatagagcttggaaatcatccatgttacagcatagtttccaaaaatggtgttacctcaagcaggaaggcacctttgcagcttagatagattcacaagccattcccacagagctcaaacctgtttacagagtgccgtccctcttccgatggcctatgaaccagccctctccccagcctgtggctgttgagctggtgatgtttccctgtacattgaatcttccaatcagagagagacgtgttgaaactccagtcttgttttggaaaaatccctggaaaagatcaatgcaggaacaatcagattcaaaggaaaagaactactcatgctgtaggctgtccaattagggagaatgctccccgtggatcggcaaggcgctttacccattcacaaatgtctcccagtcccatcccgtctctgctcccaaacccacctcctcagattctgagacactaaatagcttctcttctcttctcttctcttctcttctcttctcttctcttctcttctcttctcttcccttctcttctctctctcaacactaactcttctgtagcttatacactattaccttggcaaatagtcctcataaaatataggagaccatgcataggaaacaccattacgctgccccatccccagtgaccgtgtagagtagatgtctctaagcaaccagtagtgacaacttacccaaaaatgggcagactgtacccatgcaactgaatgtacgactcttcactgatgtcacagatgtgaactacttcttgtctgcctttcactgccttagcctggaaatgctgggaaaaacaagccatatcagtgagaattacctaaaagcaaaggaagtcactgtgaaaagcaagggaactcacttcttcccaccgggctcggtagagcatctttggcctcacagcaagtcagggtgcctgcggcctgggtcatttaggaccttatcagtgttagttttcttacctcctagtaaatgagttgatctccagaaacccctcttcccttctctagtgtttgacttttcagactaaggagggggcgtctttgaaagattccttttctattcaaacttctagcttcggaaacggaatgcatgtgggtgctcatggagtgagaatgaggatttgattcagaggaaggcagaatgacctcggaagcagagaggtacagccctgaaagtctttggaaataactgaggaaaagggaacagtctgtgcagggaactaaagatttagcctgatgttttagcagataaaaacatcgctgtagacttggtgtggagattaaatagaaacaagaagcccccagagagtcaagttcaagcatctgtctgagatttgctttcccaggcaacctgtacccagcctcctccctcaggaatttcattaaaacatctgtcccctctgtcagctctcctggaatgcctctgtccagacaattaaaacacacttgctgtgagaccagttctccgtccaaagagggagagagggaggtgacaggtaggtgagtcccacacaggcatacaaacttctggggcaccagagtttctgaggaagtttcctgatgctgacagttttcaaatggcatcggaaaccctggcattagtgcagggtttgacccagggtcattcagagcgctgtaaagattaagcgctgggcactagcccggtcctcacaatccagccagccacagcacagtgaccctccctctgtagaggctcacctttcagggacgaaccaggctgtagcaaccgtggagactgagtactgaacaagacaagcaagcttcagtcttctggcgggaaggaacaagaacggtaggcattcagaatggccttcgagaaactcattttatgcactagattgtgagggatttgctcccaatgtttttttttttcttcttcttcttcttctttttcaaagtcattcccttctaatcttgtccagactttcaattcaagtgtggacgcggtgacaagaacctttacacctgctccaccgtggggagactttccagtcaaggagaacacgctcatcctgctggggcactcactgacaaatggtattcatgaacgagaaggctgtgcacatgcaaccgacatgtgcgtgtgcacacatgtgcgtacatccggtcgttgcctcaagtgtactttgcacttcagttaaaatgtgcagaacttccagaaactggaagaagaag

SEQ ID NO: 286 - DNA, 5648 bp, Rattus norvegicus
cggagccgtccccgacgccacctcccgtctcctccgccgcagtttcctccgccgctgtcgggggtgcagagctgaggggctcgggcagcgcgccgcgcagctcctctccagtcgcccgcctcgccgtcctccccaccgagggctcgcccgggcgcccctcctcagccgcgccgggtctcctcgcgcagcgccgcggcctgcgctacctgcggccggctggcaacagaggcaacgcacactcgcggcggggcgggaggctcgcagcccctcgggcgggctcggcgaggcccggccgcgtgcggcggtttctgggggagggggctcgggtgattcagcgcccggtcaggcggaagcggccgccgccgcggaggaggaggagaaagaggaggggacagctgtccgcgcccgggcgcccgcggtggcacgagcccgcggcccgagtgcgaggcggaggcgaggaggccgcggggacgcgaggcgaggccggccggggcccccgcagccatggagaacgctcacacaaagaccgtggaggaggtgctgggccacttcggcgtcaacgagagcacggggctgagcctggagcaggtcaagaagctcaaggagagatggggctccaacgaattgccggctgaagaaggaaagaccttgctggaacttgtgatcgagcagtttgaagacttactagttagaattttattgctggcagcatgtatatctttcgttttggcttggttcgaagaaggtgaagaaacgattacagcctttgtagaaccttttgtaattctgcttatattggtagccaatgcaattgtgggtgtatggcaggagagaaacgctgaaaatgcaatagaagctcttaaggagtatgaacctgaaatgggcaaggtgtatcgacaggacagaaagagtgtgcagcggattaaagcgaaagatatagttcctggggatatagtggaaattgctgttggtgacaaagttccggctgacattagattgacatccatcaagtctacaactctgagagttgaccagtcgattcttacaggtgaatctgtctcggtcatcaagcatactgaccccgtccctgacccacgagctgttaatcaagacaaaaagaacatgctcttttctggcacaaacatcgctgctggcaaagctatgggagtggtggtggcgactggagtcaatactgagatcggcaagatccgggatgaaatggttgcaacagaacaggagagaacacccctacagcagaagctggacgagtttggggaacagctttccaaagttatctccctcatttgcattgcagtctggatcatcaacatcgggcatttcaatgacccagttcatggtggctcttggatcagaggtgccatctactactttaagattgcagtggccctggctgttgctgccatccctgagggtctgcctgctgtcatcaccacctgcttggctcttggaactcgaaggatggcaaagaaaaatgctattgttcgaagtctgccttctgtggaaacccttggttgtacttctgttatctgctcagacaagaccggcacacttaccacaaaccagatgtccgtctgcaggatgttcattctggacaaagtagaaggtgatacttgttcccttaatgagtttaccataactggatcaacctatgcacccattggagaagtgcaaaaagatgacaagccagtgaaatgccatcagtatgacgggcttgtagagttagcaacgatctgtgctctgtgtaatgactctgctttggattacaatgaggcgaagggtgtgtatgaaaaagttggagaagccacagagactgctctcacgtgcctggtagagaagatgaatgtattcgacacggagctgaagggactttctaaaatagaacgcgccaacgcctgcaactcggtcataaaacagcttatgaagaaggaattcacgctagagttttcacgtgatagaaaatcaatgtccgtctactgtacaccaaacaaaccgagccggacgtccatgagcaagatgtttgtgaagggtgctccagaaggtgtcatcgacaggtgcacccacatccgagttggaagtaccaaggtccccatgacgcctggtgttaaacagaagattatgtctgtcattcgggagtggggcagtggcagcgacacactgcggtgcctggctctggccactcatgacaacccgctgaggagagaggagatgcacctggaagattctgcgaacttcatcaaatatgagaccaatctgactttcgttggctgtgtgggcatgctggaccctcccaggattgaagtggcctcttctgtgaagctgtgccggcaagcgggcatccgagtcatcatgatcactggggataacaaaggcactgctgtggccatctgtcgccgcattggcatctttgggcaggatgaggatgtgacatcaaaggcttttacagggcgagaatttgatgaattaagcccctcagcccagagagacgcctgcttaaatgcccgttgttttgctcgagttgaaccttcccacaagtctaagatcgttgagttcctgcagtcctttgatgagatcacagctatgactggtgatggtgtgaacgacgcgcccgctctgaagaagtcggaaatcgggattgccatgggctcagggactgcagtggctaagacggcctctgagatggtgctggccgacgacaacttctccaccatcgtggccgctgttgaggaggggcgcgccatctacaacaacatgaagcagttcatccgctacctcatctcctccaacgtgggggaggtggtctgtatcttcctgacggcagcccttgggtttcctgaggctttgattcctgtccagttactctgggtcaatctggtgacggatggtctgcctgccactgcgctggggttcaatcctccagatctggacatcatgaacaaacccccacggaacccaaaagaaccgctgatcagcgggtggctctttttccgttacctggctattggctgttatgttggcgctgccaccgtgggtgctgctgcgtggtggttcatcgctgctgacggtggtccgagagtctccttctaccagctgagtcatttcctgcagtgtaaggaggacaacccagacttcgaaggagtggattgtgcaatctttgagtccccgtatccgatgacaatggcactttctgttctagtcaccatagagatgtgcaatgccctcaacagcttgtctgaaaaccagtccctgctgaggatgcccccctgggagaacatctggctcgtgggctccatctgcttgtccatgtcccttcacttcttgatcctctacgtggaacctttgccactcattttccagatcacaccgctgaatctgacccagtggctgatggtgctgaaaatctccctgcctgtgatcctcatggacgagacgctcaagtttgtggcccgaaactacctggagcctggtaaagagtgtgcgcagcctgccaccaaaccctcctgctccctgtcggcatgcaccgacggcatttcctggccctttgtgctgctcattatgcccctggtggtctgggtctacagcacagacactaactttagtgatatgttctggtcttgactgacagcgctacatgcagaagatgtttaacttaatcaattaattttttattgtttaaagcaactgtctatttctgctgaattttcacatgaacatattggctggtgaaggaggtttcatatctagattttgttttgctttttctgactccagtgggacaagattttccttttttttatacacataattaaagtgtccattgacatgtacagagaactaacactattttatgcagatatttttttgtagatgaaaaaagcatgtacagtgttctgtttcatactcatacttgtacaaagatcgttgagccagcagacattgtcagcaagttaattggcagcagacttaggaaatgaatgtgtgtggtttttaaaagaaaaaaaactaaatagcatgtattgtgtcttttgcatgattctctggatttaatttggtatcacagtctaatttttattcataagccaatttttctgcactgagcagagtcctgctacctcagtcagtatttttggtttgccactccctgcaccctcagcctctgtcacccccagcccaccctggcccgctcggctgcttctgtaggtctgatggttctgtttacatctgtcttcacgaggtttgcctgtctcgcttgtgcagaaaacattgctccagatccaatcgactgggtttctgtcccttcgcctagtttttaaggttatttatttaaatgtctaatgtattttattgtaacagacattgttttgccaacattgcctattcagtggcacttcacaatctagtttaaaagaaaaataaaacattttaaatggacagaggaaaataactgtcttgttcttaatggccttgaactacccatgatcagttcaaattcctgagcttctcagctcggagccttagtttcctgttcctgagaagaacgtgtactgctgcacagtagggattatctataatgtacaggcacgatcgtcatgtgacaaacatttactcaagtttctgctggcctggtgtatgtaggctggtgtaagggcaagtgtgtgtgtgtatgtgtgtgtgtgttctgtaaaatctgtaaatagcacatgaccaaatgaactgtatagaaatatttttatttgaatatggcactaaccaccaccaccatgactgaccggacgtttgcgcatgttcaaggtcagtcttaacggcagtgtgagtcattaacagtcctaactgtggtgttttcctccaatgccttccaacatccatcaactaaccaatactggagtaaccgcttcctaaacattgcagaaatgtaagggtgttcgggtgcgtgcatgtgcgttgttagcaacacatcttccagccctctgcatgactgagcttggggaaagagaaatagaacagcccccagctcactgtgtgatgtggaggaaatgtgtattacaagtggggttttagctgttgagtcaaaataataacaagtgtacaatttagcataaggaatcggagagcctctccagagaagtcggtttctttgctgcaagaagaatgaggttctgaacccttatccaagaacagaagccatcagccaagtctccacatttctctgcaaaatgttgtagcctctataactgtatgatagtgtaatgcatgccttcagttgtaagtggccagatcgcgctacagtgacattgaaacctgctctctaattggccctgtacagtttgcttatttataaattcatttaaaacactacagctgttgaatggttacaacctaggcctccggtcctaacttcagttgttctcctcggtgtgcagccagctgttccacactgtattattgtaacttatttagtgaagtcagaagcagtagacagatgttggtgcaatacaagtattgtgtgcatttatcgtaataaagtgctccgcgtcggttcagttcctcacagcttctcacagtgcatgtctgactgtagtctgtaaatagaggtcagtgtccgtgctgctaacaggtatcgatcgcacaga

SEQ ID NO: 287 - DNA, 1898 bp, Rattus norvegicus
cgcccacttgtacatctgggagcagaagaaaaagagggagctggagataatctgtgagaggctccgaagcccagtacatccccctgactcagccctcgcccacctcgctgctgtgactacagcaacagacaagacagctaggaagataggaagtgaggtccaataccttgtgggcagtggtgtcattagctgcaacgctaagatgtctcgagagatgggagaactcactcaaaccaggttacagaagatctggattccacacagcagcagtagcagcgtgctgcaacggcgaaggggctcctccataccacagttcactaattctcccacgatggtgatcatggtgggtttaccagctcgaggcaagacctacatctctacgaagctcacacgctatctcaactggataggaacaccaactaaagtgtttaatttaggtcagtatcgacgagaggcagtgagttacaggaactatgaattctttcgcccagacaacacagaggcccagcttatcaggaagcagtgtgctctagcagccctaaaggatgtccataagtatctcagccgcgaggaaggtcatgttgcggtttttgatgccaccaactataccagagaacggagatcgttgattctacagtttgctaaggaacatggttataaggttttttttattgagtctatttgtaatgaccccgaaattattgcagaaaacatcaagcaagtgaaacttggtagtcctgattacatagactgtgaccaagaaaaggttttggaagactttctaaagagaatagagtgctatgagatcaactaccaacctttggatgaggaattggacagccacctgtcctacatcaagatcttcgacgtgggcacacgctacatggtaaatcgagtgcaggaccacgttcagagccgtacagcctactacctcatgaacatccatgtcacacctcgatctatctacctatgccgccatggtgagagtgaactcaaccttagaggccgcattggaggtgactctggcctctcagctcggggcaagcagtatgcctatgcactagccaacttcatccggtctcaaggcatcagctccctgaaagtatggactagccacatgaagaggaccattcagaccgctgaagccctaggtgtcccctatgaacagtggaaggccctgaatgagattgatgcgggtgtctgtgaagagatgacctatgaagaaattcaggaacactaccctgaggaatttgcactacgggaccaggataaatatcgttaccgctatccgaagggagagtcctatgaggatctggttcagcgtcttgaaccagttataatggagctagaacggcaagaaaatgtactggtgatctgtcaccaggctgtcatgcggtgcctcctggcatacttcctggataaaagttcagatgagctgccctatctcaagtgtcctctgcatactgtgctcaaactcacacctgtggcttatggctgcagagtggagtccatctacctgaatgtggaggctgtgaacacacaccgggacaagcctgagaatgtggacatcacccgtgaagctgaggaagccttggacactgtacctgcccattactgagccttttcaagtgatcagattgtctctgtgctcacccccttcctcctgtaggagctgctgcccttgttctcgcttaagcagactctggctatggcctgagagtgccctacctccagtgaagaagtccgtagcagctcccaaacaggtctcaattcctagccacaactaaggcacctacctagttgtggataaagttccgttttaaatattctctgataaataaagatgtttatttctgcctataggacaggaagaggttataaagcttctttcattgcgg

SEQ ID NO: 288 - DNA, 1602 bp, Rattus norvegicus
tgcccggccgccgtcgccaccgccgccccggccgaccgagggacccgcccgcccgcggctgctccggatctagaggatcaagtcataatgggagcatttttagacaagccaaagatggaaaagcataatgcccagggccaggggaacgggttgcgatacggcctaagcagcatgcaaggttggcgagttgaaatggaggatgcacatacggctgtgatcggtttgccaagtggacttgagacatggtcattctttgctgtatatgatgggcatgctggttctcaggttgccaaatactgctgtgagcacttgttagatcacatcaccaataaccaggattttaaaggctctgcaggagcaccctctgtggaaaacgtaaagaacggaatcagaacaggttttctggagattgatgaacacatgagagttatgtcagagaagaaacacggtgcagatagaagtgggtcaacagctgtgggtgtcttaatttctccccaacatacttatttcattaactgtggggactcaagaggtttactttgtagaaatagaaaagttcacttcttcactcaagaccataaaccaagtaatcctctggaaaaagaacgaattcagaatgcagggggctctgtgatgattcagcgtgtcaatggctctctggctgtatcaagagctcttggggattttgattacaaatgtgtccatggaaaaggtcccacagagcagcttgtctcgccagagcctgaagtccatgatattgaaaggtctgaagaagatgaccagttcatcattcttgcatgtgatggcatctgggacgtcatgggcaacgaagagctctgtgactttgtgagatccagacttgaagtcactgatgaccttgagaaagtttgcaatgaagtagtcgacacctgtttgtataagggaagtcgagacaacatgagtgtgattttgatctgctttccaaacgcgcctaaagtctcagcagaggcggtgaagaaggaggcagagctggacaagtacctggagaacagagtagaagaaatcataaagaagcagggggaaggcgtccctgacttagtccatgtgatgcgcacgttagccagtgagaacatccccagcctcccaccagggggtgaactggcaagcaagcggaatgtaattgaagccgtttacaatagactgaacccttacaaaaacgacgacactgattctgcgtcaactgatgatatgtggtaaagctgctcatctagccatggtttcacctttgcctggaagagagagagagatcagcgcatccttgctgagcctttaacatccatcaccgacttaaggaaggggtccgacatgggtgagggactacagcttcagcgatggaacagccagcccagaatggatttttttttttattgtaaatttgagacttatgtaagcgtgatttcaaaccgtaattcatgttgtaaatcagactccagcaatttttgttgtatgattttggttttttgtaaagtgtaattgtccttgtacaaagtgctcatatttaattatgaactgctttaaaatcactatcaatgataaaggaaatttggcttgttgtgtggcaca

SEQ ID NO: 289 - DNA, 2661 bp, Rattus norvegicus
cgaggcgggtgccgtcggtcccgcgctgcgcgctcccttccgcgttccgccgtctgccccgcctggcaacccggccctgctcgggggccgctagccatggccggagtgccctggacacagcgctgacggcggctggcggagtgcgccatgcccagcaggaccgaccccaagatggaccggagcggcggccgcgtccgtctgaaggcgcactacggcggggacatcctgattaccagcgtggaccccacgacaactttccaggacctctgtgaggaagtgcgagacatgtgtggcctgcaccagcagcacccactcaccctcaagtgggtggacagtgaaggtgacccttgtactgtgtcctcacagatggagctggaggaggccttccgcctggcctgtcagggcagggacgaagtgctcatcatccacgttttcccaagcatcccagaacaaccgggcatgccttgtcctggagaagacaagtccatctaccgccgtggagccagaagatggaggaagctataccgagccaacggccacctcttccaagccaagcgctttaacaggagagcgtactgtggccagtgcagcgaaaggatatggggcctcgcgaggcaggggtacaggtgcatcaactgcaagctgcttgtccataaacgctgccacgtcctcgtcccgctgacctgcaggaggcatatggattctgtcatgccttcccaagagcctccagtagatgacaagaacgatggtgtagaccttccttcagaagaaactgatggaattgcttatatttcttcatctcggaaacatgacaatatcaaagatgattctgaggaccttaagcctgtcatcgatggggtggatgggatcaaaatctctcaggggctggggctgcaagactttgacctcatcagagtcatcgggcgtggaagctatgccaaggtcctcctggtgcggttgaagaaaaacgaccagatttacgccatgaaggtggtgaagaaggagctcgtccacgacgatgaggatatcgactgggtgcagacagagaagcacgtgttcgagcaggcatccagcaaccccttcctggttggcttacactcctgcttccagacaacgagccggttgttcctggtcatcgagtatgtcaacgggggggacctcatgttccacatgcagaggcagaggaagcttccagaggaacacgccaggttctatgctgctgagatctgtatcgctctcaacttcctacatgagagagggatcatctaccgggacctaaaactggacaacgtcctcctcgatgccgatggacacattaagctgacggactacggcatgtgcaaggaaggcctaggccccggcgacacaacaagcactttttgtggaaccccgaactatatcgcccccgaaatcctgcgaggagaagagtacgggttcagcgtggactggtgggcgctgggtgtccttatgtttgagatgatggctgggcgctccccctttgacatcatcacagacaaccctgacatgaatactgaagactaccttttccaagttatcctggaaaagccaattcggattccccgtttcctgtctgtcaaggcctcacacgtcttgaaaggatttttaaataaggatcccaaagagaggcttggctgccggccgcagactgggttttccgacatcaagtcccatgccttcttccgaagcatagactgggacctgcttgaaaagaagcagaccctgcctcccttccagccccagatcacagatgactatggcctggacaacttcgacacgcagttcaccagcgagcccgtacagctgaccccagatgatgaggacgtcataaagaggatcgaccagtccgagttcgaaggcttcgagtacatcaacccgcttctgctgtctgctgaggagtccgtgtgaggccatgagcatctctgttgtggacacgtctgtgaatgaccctgtcactttacccttaactacagcatatgcatgccaggccagacaccgaggctccaagcagccagagagggatgctggccaccaagaccgcagagggggcacccaacaggcacttctagacagagcaatctcttgtgtccaggccccagaggctggctttgtgctggaaggaaccacttcctgtgcccatggcggccctaccagagggtgagacagccacgccgtcttgaaaggcgcacatcttccacagagacagaactcgatgcactgatccgctccaggaaaagttagcgtgtaatgccctgaggaataaagtgtactgatgatgtcgaagcttcctctgatgccttttttctgtggcacccgcctgatgtccccaatgcagccccccacacgaggaggagctgcgctttccaagcaggcagaacgtaggcaggggacgggcacccaagtgcctgcagggatgttgtgctgcaacaagaattgttacagattcggaacgttttctaaatcccggtaagttctgttgttaatatttaacaagtattttcatacctagggcagctaaccgtggtaggctgaagccgaagggacaccccggccaggttggtggcgctgttcccaccagcccagcccgttcggactctgaagggggggaaattggatcacggagattctaaaacattgctcacc

SEQ ID NO: 290 - DNA, 3133 bp, Rattus norvegicus
gaattcgcgcacgagagcacatgctggatggactctggttccgccctttgtgcagacaaaagtgactgggtggccaggctttgcttactgtctgagttaatgaagcttgtttgataaggttttctttcaaaaaaaaattacatataaaggatttatcaaaagccctcatgaatatttcatgagttgatacattcggctgaatggattcagtgagtctcagtgtgtaacttgcacacaagccccatccacaaggaggctggtgacagaggaagcactttggcgcattttcagaggcaaaggcagcctgataaagctcctgtgacaggctgacttgccattctcccagtatgctgctcttgctctgaagtgctccaggattggaaccatcacggcttcccaaattagcctaggacgagtgtgcggacccagcagccttttaacctgcggcagtgcctttgctatgttcaagactgttgttgtggatggtgaaagctagcgcgccacacgagacatgacagcaaaaaattcttccaaagaacttccagcttctgaatctgaggtttgcataaagactttcaaggagcagatgcgcttggaacttgagcttccaaagctaccaggaaacagacctacatctcccaaaatttctccacgcagttcaccaaggaattcaccatgctttttcagaaagttgctggtgaataaaagcatccgacagcggcgtcgcttcactgtggctcatacatgctttgatgtggaaaatggcccttctccaggtcggagcccactggaccctcaagccagctcttcttcaggactggtacttcatgccgccttccctgggcacagccaacgcagagagtcttttctctacagatccgacagcgactatgacttgtcaccaaaagcgatgtcaaggaactcctcacttcccagcgaacaacacggcgatgacctgattgtcactccttttgcccaggttcttgccagcttgcgaatcgtaagaaacaatttcaccctgctgacaaaccttcacggagcaccgaacaagaggtcgccagcggctagtcaggctccagtcaccagagtcagcctgcaagaagaatcatatcagaaactagcaatggagacgctggaggaactagactggtgcctagaccagctagagaccatccagacctaccgctctgtcagcgagatggcttcaaacaagttcaaaaggatgctgaaccgggagctgacacacctctcagagatgagcagatcagggaaccaagtgtctgaatacatttcgaacacgttcttagacaagcagaacgatgtggaaatcccatctcccacccagaaggacagggagaagaagaagaagcagcagctcatgacccagataagtggagtgaagaaactgatgcacagctcaagcctgaacaacacaagcatctcacgctttggagtcaacacggaaaatgaggatcatctagccaaggagctggaagacctgaacaaatggggccttaacatcttcaacgtggctgggtactcccataatcggcccctcacatgcatcatgtacgccattttccaggaaagagaccttctaaagacgtttaaaatctcctccgacaccttcgtaacctacatgatgactttagaagaccattaccattctgatgtggcgtatcacaacagcctgcacgctgctgacgtggcccagtcaacgcacgttctcctctctacgccagcactggatgctgtcttcacagacctggaaatcctggctgccatttttgcagctgccatccatgatgttgatcatcctggagtctccaatcagtttctcatcaatacaaattccgaacttgctttgatgtataatgacgaatctgtgctggaaaaccatcacctcgctgtgggattcaagctccttcaagaggaacattgcgacatctttcagaatcttaccaagaagcaacgccagacactcaggaaaatggtgattgacatggtgttagcaactgatatgtccaagcacatgagcctcctggctgaccttaaaacgatggtagaaaccaaaaaggtgacgagctccggtgttctcctcctggacaactatactgaccggatacaggttcttcgcaacatggtacattgtgcagacctgagcaaccctaccaagtccttggagttgtatcggcaatggactgatcgcatcatggaggagtttttccaacagggagacaaagaacgggagaggggaatggagattagcccaatgtgtgataaacacacagcttctgtggaaaagtcccaggttggtttcattgactacattgtccatccattgtgggagacctgggcagacctggttcagcctgatgctcaagacattttggacacactagaagataacaggaactggtaccagagtatgattccccagagcccctctccaccactggacgagaggagcagggactgccaaggccttatggagaagtttcagttcgaactgacccttgaagaagaggattctgaaggaccggaaaaggagggagaaggccccaactatttcagcagcacaaagacactttgtgtgatcgatccagagaacagggattctctggaagagactgacatagacattgccacagaagacaagtctctgatcgacacataatctccctctgtgtggaggtgaacattctatccttgacgagcatgccagctgagtggtagggcccacctaccagagccaaggcctgcacaaaacaaaggccacctggctttgcagttacttgagtttggagccagaatgcaaggccgtgaagcaaatagcagttccgtgctgccttgccttgccggcgagcttggcgagacccgcagctgtagtagaagccagttcccagcacagctaaatggcttgaaaacagaggacagaaagctgagagattgctctgcaataggtgttgaggggctgtcccgacaggtgactgaactcactaacaacttcatctataaatctcacccatcctgttgtctgccaacctgtgtgccttttttgtaaaatgttttcgtgtctttgaaatgcctgttgaatatctagagtttagtacctccttctacaaactttttt

SEQ ID NO: 291 - DNA, 4835 bp, Rattus norvegicus
gagcagaggcgcaggacgtccgtctccgcgcgcgtgacttctgcctgcgctcaagcttcagagttcagtttcaaggagccgcccaaccatgaagacaccgtggaaggttcttctgggactgcttggtgtcgctgcgcttgtcaccatcatcaccgtgccagtggttctgctgaacaaagatgaagcggccgctgatagcgcgagaacttacacactagctgactatttaaagaatacctttcgggtcaagtcctactccttgcggtgggtttcagattctgaatacctctacaagcaagaaaacaatatcttgctattcaatgctgaacacgggaacagctccattttcttggagaacagtacctttgagatctttggagattctataagtgattattcagtgtcacccgacagactgttcgttctcttagaatacaattatgtgaagcaatggagacactcctacacggcttcatacagtatttatgacttgaataaaagacagctgatcacagaagagaagattccaaataatacacagtggatcacatggtcacaagaaggtcacaaattggcatatgtctggaagaatgatatttatgttaaaattgaaccacatttgcctagtcataggatcacatcaacaggaaaagaaaatgtaatatttaacggaataaatgactgggtttatgaagaggaaatcttcggtgcctactccgcactgtggtggtctccaaacggcacttttctagcttatgcccagtttaacgacaccggagtgcctctcattgaatactccttctactctgatgagtcactgcagtaccccaagacagtctggattccgtacccaaaggcaggagctgtgaatccaactgtaaagttctttattgtaaatacagactctctcagctcaactactactacgattcccatgcaaatcaccgctcctgcatctgtgacaacaggggatcactacttgtgtgacgtggcctgggtttcagaagacagaatctcgttgcagtggctcaggaggattcagaactattccgtgatggcgatctgcgactatgataagaccaccctagtatggaactgtccaacgacgcaggagcatattgaaacgagtgccacaggctggtgcggaagatttaggcctgcagaaccccacttcacctccgacggaagcagcttctataaaatcgtcagtgacaaagatggctacaaacacatctgccagttccagaaagataggaaacccgaacaggtctgtacatttattacaaaaggagcctgggaagtcattagtatcgaagctctgaccagcgattatctgtactacattagtaatgaatataaagaaatgccaggaggaagaaatctttataaaattcagcttactgaccacacaaataagaagtgccttagttgtgacctgaatccagaaagatgccagtattactcggtgtcacttagtaaagaggcaaagtactatcagctgggatgccggggccctggtctgcccctctacactctgcatcgcagcactgatcaaaaagagctgagagtcctggaggacaattctgctttggataaaatgctgcaagatgtccaaatgccttcaaaaaaattggacttcattgttctgaatgaaacaagattttggtatcaaatgatcttacctcctcattttgataaatccaagaaataccctctactaatagatgtatatgcaggtccctgtagtcaaaaagcagatgctgccttcagactcaactgggccacttaccttgcaagcacagaaaacatcatagtagctagctttgatggcagaggaagtggttaccaaggagataagatcatgcatgcaatcaacaaaagacttggaacactggaagttgaagatcaaattgaagcagccaggcaatttttaaaaatgggatttgtggacagcaagcgagttgcaatttggggctggtcatatggagggtacgtaacctcaatggtcctgggatcgggaagtggcgtgttcaagtgtggaatagccgtggcgcccgtgtcacggtgggagtactatgactcagtatacacagagcgttacatgggtctcccaactccagaggacaaccttgaccattacaggaactcaacagtcatgagcagagctgaaaattttaagcaagttgagtacctccttattcacggtacagcagatgataatgttcactttcagcagtcagctcagatctccaaagccctggtggatgctggcgtggatttccaagcaatgtggtacacggacgaagaccatgggatcgccagcagcacagctcaccagcacatctattcccacatgagccatttcctccagcagtgcttctccttacgctagcatggcaaggctctccgcagcttactcaagagcacacttgtcctcattatctcaaaactgcactgttaagatgacgattttaataatgtcgcctcgagaaattccagcctacttcccagttttatacctgcaatcctaactaaggatgcctgtcttcagaacagattattaccttacagcaatttggatttccccctctgttttgtttatcatttaaaaccatttccacatcagctgctgaaacaacaaatataaattatttttgcaagagctatgcatagatttcctgagcagaatttcaatttttttcccccttactaggctggtccaaatcttgttcccttatttaagggggtggcaagacgtgggtaatgatgtcattaggccagcaacaagagaagcgggaacagagaatatggctagaaacccaggtccaagcatacaaacccaaccaggctactgtcagctcgcctcgagaagagctgctcactgccagactggcaccgttttctgagaaagactattcaaacagtctcaggaaatcatatatgcaaagcactgacttctaagtaaaaccacagcagttgaatagactccaaagaaatgcaagggacgctgccagcaatgtaagggccccaggtgccagttatggctataggtgctacataaacacagcaagcctgatgggaaagcatgttaaatgtgcttttaaaaattaccaagtctcctagtgagaagaggcagcttggaacatagcgacttgccccgttaaaagttgaaaatatttgtgtcacaaattctaacatgaaggaatacttgcgtcagttcttcctacttcctttctttgagcattttcattaaagcattttaacttcattatctttctaatggaaaactgtatgagaatgttttgtgttattatttctattctacacactggaatgttgcctggtcatttagcaagtatgcttccattttttcaaaggtaatgggttatatcttgaatcaaacttaaactgcattgacatatggacacatttgttcaaaggttcttgtttaacttgtgtgaaatccaagactgtcttgtaaacatggaaagagttcaacttttaaaaaaaaatttagatacataaaactgtttaaagttatatgattcataagagtttatctaatacccccagaaatttctactcacatttatcacatagcttggtcatttacatactatggaactcataatattatttaacttaggggagcacgtgaggttcgtggcacgagatggaatgctatcagcagagtagacatgtttttccagggtcttgttttttgtttttgtttctggtctcttcctgtttgggcggagggtaatataatagataatatacataatagaatacactctgatacctgacttagccgtgttttgacaacttggaaacttgattcaattatttataacacagctgaaaatttaaaatggactccacacatttaaatgcagtttcaggccaattttctaggtacaattaccacagacaggtgagctacagcataaattccaaacatggcagaaatggaaattacctataaatataaatgagtttagatattgatgagcctgatgctatttcccgggcactccactgttcccctcaccttaaggaactctcaagtcctgctcttccactgcaagcacagctggtccttaaatctacaggcctctggctacagtccgaatttgaacacagttctgtcaccgtgtgcagcagcagcagccatgtgcaaagttctagatcaaggaacaaaggtagcacatgttcctgacagtgtggaaacataaacataaatgcgaattaaatagaaattatcccttctgaattctttttgttcctttcatttctaaataggttgttcctggagcctgaattaataaaaagaacacagcacacatttttcaggcgatgagggtttcacatggtgataatgtgaatacattcagtttttatttgattctcataggtcaagttttactgttcggtaagagttgtaaattagattaaaaccctgatgcataagttgtaaacaaacttaatttaagagcaagtttgaaaagcacaagagctaataacaccactgaggcatatagacaagtctcttatgggcatatgcagctccctgaagcgcatggatcaagctaccgcctcagagcacaccagcaccaggggcgcatgctaaaggaagagctcccctccccaccccccatgcttcacgatccatgttgacttcagtctgtgccattctgggcatcatagttctccttcagattattagcagttccacctcttggcacgtactacttttgctctaagttggagtgagagtactggtttataagattactggatttgtacaatatttaagattcaataaattctaagtg

SEQ ID NO: 292 - DNA, 2287 bp, Rattus norvegicus
gttctgcctgccctgtctatcacccaggaacatggaggctcgggtacccatctgcaagggcaacgtcacacctcctgaggacagccaggaggactctggcttttgctgagctgtgcatcttacctccttccttccaaaggcttcagacccaagctccactctcctcaagtcgtgcgctgtgcccctggctaagcatctcactgtccctcaagccccatccagtcctagagcacacctcgaggacctgccctcctgctcagaatgactcaccattatttccagctcaagtgagaagatgtgacgggactgagctgcctatttgtgtatctgtggcatcagatctgctcttcaaggaagagaacctcagctcctgcctgccagccaaaggaggctgtgactccaactcacagaaggctctgggtctttcctacaggagcgcagactaatgcttctgtgtttcctggggcccagttaccagcaccctgagttccctgctgcaggcagctggaaggcataaaataaagcacactcctcagccccaattatgacagtggctaccggagacccagtggatgaggctgctgccctccctgggcaccctcaagacacctatgacccagaggcagaccacgagtgctgtgagagagtggtgattaacatctcaggcctgcggttcgagactcagctaaagaccttagcccagttcccagagaccctcttaggagaccccaagaaacggatgaggtactttgatcccctccgaaatgagtacttttttgatcgcaaccgccctagctttgatgccattttgtactactaccagtctgggggcaggttgaggcgacctgtgaatgtgcccttagatatcttctctgaagaaatccggttttatgagctaggagaagaggcaatggagatgtttcgggaggatgaaggctatatcaaggaagaagaacgtcccctgcctgaaaatgagtttcagagacaggtgtggcttctctttgaataccctgagagctcagggccggccaggatcatagccattgtatctgtgatggtcattctgatctcgatcgtcagcttctgtctggaaaccttgcccatcttccgggatgagaacgaggacatgcatggtggtggggtgaccttccacacctattccaacagcaccattgggtaccagcagtccacctccttcaccgaccctttcttcatcgtagagactctctgcatcatctggttctcctttgagtttctggttagattctttgcctgtcccagcaaagctggcttcttcaccaacatcatgaacatcattgacattgtggctatcatcccttactttatcaccctggggacagagttagctgagaagccagaggacgcccagcaaggccagcaggccatgtcactggccattctccgtgtcatccggttggtaagagtctttaggattttcaagttgtccagacactccaaaggtctgcagattctaggtcagaccctcaaagccagcatgagggaattgggcctcctgatattcttcctcttcattggggtcatcctcttctctagtgctgtctattttgcagaagctgatgagcgagattcccagttccccagcatcccggatgccttctggtgggcagtcgtctccatgacaactgtaggctatggagacatggttccaactaccattgggggaaagatagtgggttctctgtgtgcaattgcaggtgtgttaaccattgccttaccagtccctgtcatagtgtctaatttcaactacttctaccaccgggagacagagggagaggagcaggcccagtacttgcaagtgacaagttgtccaaagatcccgtcctcccctgacctaaagaaaagtagaagtgcctctaccataagtaagtctgattacatggagatacaggagggagtaaacaacagtaatgaggactttagagaggagaacttaaaaacagccaactgtaccttggctaacacaaactatgtgaatattaccaaaatgttaactgatgtctgattgaaacctattaatgtactcacagctcaacaggactaatgcagatattgcataatagcctgcattgtagtcagtgttctacagtgtgcatctggttctgcatggaaagcaatagtcgtgcaagtgacttttgatcttttgatttttgatttagaacacagaatatttatcatggctttcatgaaatctttatcaccgacttacaggtttccaaagatgagagtcacccatggagccagcatc

SEQ ID NO: 293 - DNA, 2442 bp, Rattus norvegicus
gacagaaaacctagagatggaattaaattatggccagctctcacaaggtcaactttgatgtattacgtgaatgatggagtgtatgggtcatttaactgcattctttatgaccatgcacatgtcagtccctgcagccgccgccgccggccgccttcagtcagcagctcggcgccacctccggtcggcgactgcggcgggctcgacgaggcggctgacggggcggcggcgggaagacggccgggtgcgccttggggtttagtggcggcttctccatgggtccagccagccgcttccctgtgctgtgagtgtttccaccactccaggagacagcattcagagttgaccttgtgagagctggccataatttaattccatctctaggttttctgtcttattgtttcagaggcacatcgagaaccaaccatgggcagctttactaaggaagagtttgactgccatatcctcgatgaaggtttcactgctaaggacattctggaccaaaaaatcaatgaagtttcttcctctgatgataaggatgctttctatgttgcggacctcggagacgttctaaagaagcatctgaggtggctgaaagctcttccccgtgttactcccttctatgctgtcaagtgtaatgacagcagagccatagtgagcaccctggctgccattgggacaggatttgattgtgcaagcaagactgaaatacagttggtgcaggggcttggggtgcctccagagaggattatctatgcaaatccttgtaagcaagtgtctcagatcaagtatgctgccagtaatggagtccagatgatgacttttgacagtgaaattgagttgatgaaagttgccagagcacatccaaaggcaaagttggttttgcggattgccactgatgattccaaagcagtttgtcggctcagtgttaagtttggtgccacactgaaaaccagcaggcttctcttggaacgggcaaaagagctaaatattgatgtcattggtgtcagcttccatgtgggcagtgggtgtactgaccctgagaccttcgtgcaggcagtgtcagatgcccggtgtgtctttgacatgggaacagaagttggtttcagcatgtatctgcttgacattggtggtggctttcctgggtctgaagacacgaagcttaaatttgaggagatcaccagtgtaatcaacccagctctggacaagtacttcccatcggactctggagtgagaatcatagctgagccaggcagatactacgtcgcatcagctttcacacttgcagtgaatatcattgccaaaaaaaccgtgtggaaggagcagaccggctcggacgatgaagatgagtcaaacgagcaaactttgatgtattacgtgaatgatggagtgtatgggtcatttaactgcattctttatgaccatgcacatgtgaaggccctgctgcagaagagacccaagccagatgagaagtattactcatccagcatctggggaccaacatgtgatggccttgatcggatcgtcgagcgctgtagcctgcctgaaatgcatgtgggtgattggatgctgtttgagaacatgggtgcatacactgttgctgctgcttctactttcaatgggttccagaggccaaacatctactacgtaatgtcacggtcaatgtggcaactcatgaagcaaatccagagccatggcttcccgccagaagtggaggagcaggatgttggcactctgcccatgtcttgtgcccaggagagcgggatggaccgtcaccctgcagcctgtgcttctgctagtatcaatgtatagatgccattcttgtagctcttacctgcaagtttagcttgagttcacggcatttggggggaccatttaacttaattactgctagtttggaatgtctttgtaagagtagggttggcaccaatgcagtatggaaagactaggagatgggggtcacacttactgtgttcctatggaaactttgaatattttatatggatttttattcacttttcagacctgatactaatgagtgcccctcggctgctgagcaagcatttgtagcttgtacattggcagaatgggctaaaagcttatgttgtgacccattttgaaaataaagtatcttgaaatgattggacattggagaatgtgtgcaagtatcccttacagaaggcacaaacttctgcacaggctgtgtgttacagcagtgagtctagcccagcagagatgtggatgatacaaagctgtgccccctctgtacagcatcaatgtgcttagcccatctcaagtgtttactgtgaacttggtgcccaaagtctcttaagagtgtcatctgcctagtggcctcttgacttggccacttcctaaggagagggcatctgaggctctttgaaccttgcctgcagaaaccctgactgctccctcaacccttggccg

SEQ ID NO: 294 - DNA, 333 bp, Rattus norvegicus
atggccctgtggatccgcttcctgcccctgctggccctgctcatcctctgggagccccgccctgcccaggcttttgtcaaacagcacctttgtggttctcacttggtggaagctctctacctggtgtgtggggagcgtggattcttctacacacccatgtcccgccgcgaagtggaggacccacaagtggcacaactggagctgggtggaggcccgggggccggtgaccttcagaccttggcactggaggtggcccggcagaagcgcggcatcgtggatcagtgctgcaccagcatctgctctctctaccaactggagaactactgcaactag

SEQ ID NO: 295 - DNA, 1393 bp, Rattus norvegicus
ggggggcgtgattccgtcctgcgtgtctgttctgcggaacagtaggcagttgttttccgtccggcttctctcacactcaagtgcgcgcctccacctcatggaagactcgatggacatggacatgagccctcttaggcctcagaactaccttttcggttgtgaactaaaggctgacaaagattatcactttaaagtggataatgatgaaaatgagcaccagttatcattaagaacggtcagtttaggagcaggggcaaaagatgagttgcacatcgtagaggcagaagcaatgaactatgaaggcagcccaattaaagtaacactggcaactttgaaaatgtctgtacaaccaacagtttcccttgggggcttcgaaattacaccacctgtggtcttgaggttgaagtgtggttctgggcctgtgcacataagtggacagcacctagtagctgtagaggaagatgcagagtcagaagatgaagatgaggaagatgtaaaactcttaggcatgtctggaaagagatctgctcccggaggtggtaacaaagtcccacagaaaaaagtaaaacttgatgaagatgatgatgaggatgatgaagatgatgaggatgatgaagatgatgatgatgatgattttgatgaagaggaaactgaagaaaaggttccagtgaagaaatctgtacgagataccccagccaaaaatgcacaaaaatcaaaccaaaatgggaaagatttaaaaccatcaacaccaaggtcaaagggtcaagagtccttcaaaaaacaggaaaaaactcccaaaacacccaaaggacctagctctgtagaagacattaaggcaaaaatgcaagcaagtatagaaaaaggtggttctcttcccaaagtggaagccaagttcattaattatgtgaagaattgtttccggatgactgaccaggaggctattcaagatctctggcagtggaggaagtctctttaagaaaatggtttaaacagtttgaaataattctgtcttcatttctgtaatagttgctatctggctgtcctttttataatgcaaagtgagaactttccctactgtgtttgataaatgttgtccaggttcaattgccaagaatgtgttgtctaaaatgcctgtttagttttcaaggatggaactccgccctttacttggttttaagtatgtatggaatgttatgataggacatagtagtagtggtggtcagatgtggaaatggtagggagacaaatatacatgtgaaataaactcagtattttaataaagtaaaaaaaaaaaaaaaaaaaaaaaaaaaaaaaaaaaaaaaaaaaaaaaaaaaaaaaaaaaaaaaaaaaaaaaaaaaaaataaaaaaaaaaaaaaaaaaaaaaaaaaaaaaa

SEQ ID NO: 296 - DNA, 3079 bp, Rattus norvegicus
cgcccgccgcgcggcccgagggcgcccccagagcggagctgcggccaggaggaggacgcggccatggggctgctgtcccaaggctcgccactgagctgggaagagacccagcgccacgccgaccacgtgcggagacacggcatcctccagttcctgcacatctaccacgcagtcaaggaccggcacaaggacgtgctcaagtggggtgacgaggtggagtacatgttggtgtcctttgatcatgaaaataggaaagtccagttgttactgaatggcggcgatgttcttgaaactctgcaagagaagggggagaggacaaaccccaaccacccaaccctctggagaccagagtatgggagttacatgattgaagggacacctggccagccgtacggaggaacgatgtccgagttcaacacagtggaggacaacatgaggaaacgccggaaggaggctacttctgtattaggagaacatcaggctctttgcacgataacttcatttcccaggctaggctgccctggattcacactgccagagcacagacccaacccagaggaaggaggtgcatctaagtccctcttctttccagacgaagccataaacaagcacccccgctttggtactctaacaagaaacatccggcatcggagaggagaaaaggttgtcatcaatgtgccaatattcaaggacaagaacacaccatctccgtttgtagaaacatttcctgaggatgaggaggcatcaaaggcctctaagccagaccacatctacatggatgccatgggatttgggatgggcaactgctgtcttcaggtgacattccaagcctgcagtatatctgaggcaagatacctttatgaccagttggccactatctgcccaattgttatggctttgagtgctgcatcgccattttaccgaggctacgtgtcagacattgattgtcgctggggagtgatttctgcatctgtagatgatagaacacgggaggagagaggactggagcccctgaagaacaatcgctttaaaatcagtaagtctcggtatgactcaatagatagctacctgtccaagtgtggagagaagtacaatgacatcgacctgaccatcgacacggagatctacgagcagctcttagaggaaggcatcgatcaccttctggcacagcacgttgctcatctctttattagagacccactgaccctttttgaagagaaaattcatctggatgatgccaacgagtctgaccattttgagaatattcagtccacaaactggcagacaatgaggtttaagcctcctcctccaaactcagatattggatggagagtagagttccgaccaatggaggtacagttgacagactttgagaactctgcctatgtggtatttgtggtactgctgaccagggtgatcctctcatacaaactagacttcctcattccactgtccaaggttgacgagaacatgaaagtggcacaggagcgagatgccgtcttacaggggatgttttatttcaggaaagacatttgcaaaggtggcaacgccgtggtggatgggtgtagcaaggcccagaccagctccgagccatctgcagaggagtacacgctcatgagcatagacaccatcatcaatgggaaggaaggcgtgtttcctggactcatccccattctgaactcctaccttgaaaacatggaagtcgacgtggacacccgatgcagtattctgaactacctgaagctaattaagaagagagcatctggagaactaatgactgttgccaggtggatgagagagtttattgcaaaccatcctgactacaagcaagacagtgtaataactgatgagatcaactatagcctcattttgaaatgcaatcaaattgcaaatgaattgtgtgaatgtccagagttacttggatcaggctttagaaaagcgaagtacagtggaggtaaaagcgacccttcagactagacatccagcaaagtggatggcagctgcagccctgaccccgagcccactcagacgctgtgaagaccaagatggcctacagtgttccagttgcccacaagtgactagaagcttccttcagtaggtgaatctgagtttgtatatgtatatactaaagtatttttatgattattaacaatgtattttaataacactgtatctacagtcatggtgaactggcttgtacatttttgaattctgactctggagcgactgctgtctaggcagttttgtaaatgtaattgtacaatacatgtacctgcattccagagtttcaatgtttactgtaaaccttctttaatactacctgggacctgattcactgaaatttatttttaaaaaaatgctttctcctacctgtttcttgagtctcctcttgctgtgtacgtgaagtcactggactgcactgatgccctctgagggcgaggcaccttacctgtgacacttcctttgcagagcagtcccactcctgccacggaactgaactctgccagctattagaaaagaaactacaaatcctagattcgtctgaatatacagactcagagaatatttagtttcatctgaaaaggaaaaccttttccttctatgtacaccaagagctctgtcaaatgtctgctctccattaccacctgtctgacctctgctgagaacagtcgtcagtgcagccaccaggtttccgccctctctcaagtttgctgtagcagattggcagactgtcttctaacagccattcatttcattccagattttcccaggggaatagtctgcatcctgcttgctttctgtataaaacttacaaatcaatcatgaaatgcactaatttttgtgaatcaggaccctaagtgtttaattgtaaataatttgtttcatagattgctttaggtttgtgttatctttttaattgttaactgaatttaactacttctaaagtaactgaactgtagattaagccaagctttacagataaaaatatttactgtaatgctaattttgaaagattgcaataaagccacttcagcttaaagctttaaaaaaaaaaaaaaaaaaaaaaaaaaaaaaaaaa

SEQ ID NO: 297 - DNA, 696 bp, Rattus norvegicus
gctcttccggtgcgggacccgctcttccggtcgcgagcacccggggtgtagagggcggtcgcggcggtcgcctgggcagcagtggcagaatgttggctaccagggcacttagcctaattggcaagagagccatttctacttcggtgtgccttcgggcacatgggagtgttgtgaagagtgaagactatgctctcccatcttatgttgatcggcgtgactaccccttgcctgatgtggcccacgtcaagctgctgtctgccagccagaaggccctgaaggagaaggagaaggccgactggagcagcctttccagggatgagaaagtccaattgtaccgcatccagtttaacgagagcttcgctgagatgaacaagggcaccaatgagtggaagacagtggtgggcctggccatgttcttcatcggcttcactgcgcttgtgctgatctgggagaagagctacgtgtatggccccatccctcatacctttgatcgtgactgggtggccatgcagaccaagcggatgctggacatgaaggtcaaccccattcagggcttctccgccaagtgggactacaacaagaatgaatggaagaagtgagagcctgctgctgtgggctcctccctccctccctccctcagcatgctggaagctgctgtgtccaatggtccatgttaataaatgaccagtttacgtg

SEQ ID NO: 298 - DNA, 1337 bp, Rattus norvegicus
gcatctgcgccctccgcagtcctctgcctcgttgccgctccgtctccccagagtcgccttctctcatcgctgcagccatgaacgggcagctcaacggcttccatgaggcgttcatcgaggaggggacattccttttcacttcagagtctgtaggggaaggtcatccagataagatttgtgaccaaatcaatgatgctgtccttgatgcacaccttcagcaggaccctgatgctaaagtggcttgtgaaactgttgctaaaactggaatgatccttcttgctggggaaattacatctagagctgccattgattaccagaaagtggttcgtgaagccataaagcacattggctatgatgattcttccaaagggtttgactacaagacttgtaatgtgttggttgccttggaacaacagtcaccagatatcgcccaaggtgttcatcttgaccggaatgaggaagacattggtgcaggagatcagggtttgatgtttggttatgccactgatgaaactgaagagtgtatgcctttaactattgtcttagcacacaagctaaatgctaaactggctgagctacgccgcaatggcacattgccttggttacgcccagattctaaaactcaagtgactgtgcagtatatgcaagatcgaggtgctgtgattcccatcagagtccatacaattgttatatctgttcagcatgatgaagaagtttgtcttgatgaaatgagggatgctctgaaggagaaattgatcaaagctgttgtacctgcaaagtaccttgatgaggatacaatttaccacctacagccaagtggcagattcgttattggtgggcctcagggtgatgctggtttgactggccgaaaaatcattgtggatacttatggcggttggggagctcatggaggaggggccttttcaggaaaggattataccaaagtggaccgttcagctgcttatgctgctcgttgggtggcaaaatcccttgttaaaggaggtctgtgcaggagggttcttgttcaggtctcttatgctattggagtttctcatccattgtcgatctccattttccattatggtacttctcagaagagtgagagagagctattagaaattgtgaagaataattttgatcttcgccctggggtcattgtcagggatctggatctgaagaagccaatttatcagaggactgcagcctatggccactttggtagggacagcttcccctgggaagtgcccaaaaagcttaaatattgaaagtgttagccttttttccccagacttgttggcgtaggttacagagaagccttcaagctctgagggaaaggg

SEQ ID NO: 299 - DNA, 1566 bp, Rattus norvegicus
agtccccaagcggagccgggcgcgccgagccaggagctgggagccgagcgccgggctggggccggggccggagcgcagcgaaaagggagcgcgcccgccccagcccgaggtccgccgccgccggaccgggcgccatggagcccgacaacagtccacggaagatccagtttacggttccgctgctggagcctcacctggacccggaggcagccgagcagattcggaggcgccgccccacccctgccacacttgtgctgaccagcgaccagtcatccccagaagtagatgaagaccggatccccaacccacttctcaagtccacactgtcaatgtctccacggcaacggaagaagatgacaaggactacacccaccatgaaagagctccagacaatggttgaacatcacctagggcaacagaaacaaggggaagaacctgagggagccactgagagcacagggaaccaggagtcctgcccacctgggatcccagacacaggctcagcgtcaaggccagatacctcggggacagcacaaaagcctgcagaatccaaacccaagactcaggagcagcgtggtgtggagcccagcacagaggacctttcagcccacatgctaccactggattcccaaggagccagcttggtctgacagaagttgacatccggggatcgccagtgagtgtggaagttcatggacactggatgtttcttaatctcttgtttttaaacgtgataaatttggtgttaggtccttggtgcttttcttctttccagcctggggattccttcctccctcggctcttgtctgcaccccacagcccccaccctcaggaccaactaagctaggaaataggaaactgactgaagcctagcctctactagcataaagaaaaagaggagtgtggaagtaggagatcacttcaaggctttcctttcttactgtggaaagctccgcccacgtagcagggccgcctacttgggagactgccactctaaagcagatacccagaccagcgagggcttgctatagcaccatctgctggacataaatgggaagtgcatcttgtcccgaaacccctgacaaagggagtatttggaatctggttccaattgtgtggcactgttccttattctaacctgacaacaaagactgtcagaaaacccagtgactagaaacccctcttccattgtcctacctactaaggtcagggcaagactaacaccatgcacaaatggagaagtggtctctgattctagccaggcttctgctgctgattctgattttcccaaagaattaaagagatggagggagaaggaagactctttcgtccccttttcttcagcagtaccacatagctaagaagagcatagcctgggcagtgaaggactgtgtgccgtagcgccccacccccacccccagataggctttacttgaatccccgcttcaacactcatggagaataccatggcagagttctgtctagcttaggaagataactataaatgacacgtgagagagcttctacctaatgaacaccacacacatccaaaaaaaaaaaaaaaaa

SEQ ID NO: 300 - DNA, 3504 bp, Rattus norvegicus
ctctgcttttctctttcagagctgttgcgcagccattggtacctgtattggggaaacatagcatacaagcaagaagcttacagcctcagtggcgaaaaatttttcatgtcagagaccgagaactcttgcagtcgtttatgtcatcccttcttctccagacagaagataccaaaaagttgcaatcaaagatctgttcatcttattgataaagtcactaataagccaaaatgtctgtcaacgtcaaccgcagcgtgtcagaccagttctatcgctacaagatgccccgtttgattgctaaggttgagggcaaaggaaatggaatcaagacagttatagtcaacatggttgacgttgcaaaggcgcttaatcggcctccaacgtatcccaccaaatattttggttgtgagctgggagcacagacccagtttgatgttaagaatgaccgttacattgtcaatggatctcatgaggcgaataagctgcaagacatgttggatggattcattaaaaaatttgttctctgtcctgagtgtgagaatcctgaaacagatctgcatgtcaatccaaagaagcaaacaataggtaattcttgtaaagcctgtgggtaccgaggcatgcttgacacacatcataaactctgtacattcattctcaaaaacccacctgagaatagtgacattggtacaggaaagaaagagaaagaaaagaaaaatagaaagggcaaggacaaggaaaatggctctgtatccaccagtgagacaccaccacctccaccaccaaatgaaattagtcctccacatgctgtggaagaagaggaagatgatgattggggggaggatacaactgaggaagctcaaaggcgcagaatggatgaaatcagtgaccatgcaaaaggtctgacacttagcgatgatttggaaagaactgtagaagagcgtgttaacatcctgtttgattttgttaagaaaaagaaagaagagggcattattgattcatctgataaagacattgtggctgaggcagaaagactggatgtaaaagccatgggccctctcgttttgacagaagttctctttgatgagaagataagagagcaaatcaagaaatacaggcgccattttttaagattttgtcataacaacaaaaaggcccagcggtaccttcttcatggtttggaatgtgtggtagcaatgcatcaagctcagttgatctccaagattccacatatcttgaaggagatgtatgatgcagaccttttagaggaagaggtcattatcagctggtcagaaaaggcctctaagaaatatgtctcaaaagaacttgccaaagagattcgtgtcaaagcagagccatttattaaatggttgaaggaagcggaggaggaatcttctggtggtgaggaagaagacgaagatgaaaatattgaggtggtatattcgaagactgccagtgtaccaaaagttgaaactgtgaagtctgacaacaaggatgacgacattgatattgatgccatttaaaaggatggatgcaacttagcttaacagtgtaatgctgcaaatttttctccattatcagccagaagtgcaacatgtatgtgcaagagctaaagtggcttaacatcatgctacacttgatactaaaaagctattactgtgagtggtctataattaagcccaatgagacatctagggagtccatacatatcagtgagcagttgtagtttgcttatttatagcatgtttctttcggaaaaactagtggtggacacatttggatcacatttatacagttataaaaaataaagatttgattttggtcattcttcagactttgggctatgaatggcttatgctgaagtaattggctacttttaggatgttacaccatttaataacttagacttcttaagtttggtagattgttaggtactgaagacttgaagaatgcaaacaattataatgaccttactcagccattaagaaatgaagtattttgaaagttgtgtctccagtccattgagattggcaactgacaattcttgtcattctaaggaaatttgatgatttaatgacagtgtgacatcctcatgagaagtaaaaatgacctgtgtgtcctatggtttaagagcaaattttgaaacttggagttgtggtttttcagtttgtgtacactcaccccaaattgtagtctattgagtcatgtgcattgcacgttggataagccagggaaatgacaaataagtattttgtgtgtatttagtggttgctttgtactgagagaaaagctttgaggtgtgattaaatcgtaaactctgattctatttgggagaaacaggaaaaaggtgcacttaatctaaaacagcataagttttcaacttttacccttaaattataatttcaagatgtttagacatactgtatcttgtgtttgatgtgttccccctccctaatattatggtttattctttaatgccttttaatttggatataatagcttgtactttagattttggttgctatcttgccaaaataagtgttactgtttttcaagcttgatccccttccctgattgtcttatttaaagagaaagttaaactcatacttctgagtcagagcctgtattttggttaagacttgggatattttttacttcacattgaatatagctggatacctgagaagtctggtgatggcactgggtgggtgcagctagctaaggcctgaccagcccattcagagccttggacttcagacacaaaagtgagtttcttacccacttgctggtgtaaactctatctggggtcctgactatatttgaatacttgtcttcaatattaaaaaacatagcacatttttctttctacaaaagtacattctggagttaagaacccatgtggttgatttgtgtgtggcgtgctagctcatacattatttggatcttattctttgtgtcatccatctcacagattataagactttgattaatgtaaaaagtatgcgttaaaatcataccaaacatttggtaaaattaaaaccttgatgggaggctgggcgtggaacaggagccatatacctggaatggtaacaggggaatgtgctatgtcacaccaaagaagtgggacttggaaagtcacttgtctcctgggtttcagactctttgttgcatgggcagcccatccatatgtcattactttttgagattctcaagtagatcagcacatttcggcctcaggttggcaagattttgtcttagagctgttgctttaaagggaaatggtcaggtcttagacacttaggaaggtcttgggcttctgttcattctggtgccaaaccagtgggattcaaatttcacacaatctgggtttttattcatggaggttaacctggtaagagtaatccttcatggctctattgaggtgtcttaaaaagtttcctgtttcaaacagctacattacttgattaaaacaatgttataaaattaaatttccccctcctttcatattaa

SEQ ID NO: 301 - DNA, 1239 bp, Rattus norvegicus
agagaggcccacgatgagagccctgggagctgtcgtcactctcctgctctggggtcagctttttgctgtggaattgggcaatgatgccacagacattgaagatgacagctgcccaaagcccccagagattgcaaacggctatgtggaacacttggttcgttatcgctgccgacagttctacaaactacagaccgaaggagatggaatctacaccttaaacagtgagaagcaatgggtgaacccagctgctggcgataaactccccaagtgtgaggcagtgtgtgggaagcccaagcatcctgtggaccaggtacagcgcatcatcggtggttccatggacgccaaaggcagctttccttggcaggccaagatgatctccagacatggactcaccactggggccacactgatcagtgaccagtggctgctgaccactgcccaaaacctcttcctgaatcacagtgagaatgcgacagccaaggacattgcccctaccttaacactctatgtggggaaaaaccagctggtggagattgagaaggtagttctccaccccgagcgctctgtggtggatatcgggctgatcaagctcaaacagaaagtgcttgtcactgagaaagtcatgcctatctgcctgccttccaaagactacgtagcgccaggccgcatgggctatgtgtccggttgggggcggaatgtcaactttagatttactgaacgtctcaagtatgtcatgctgcctgtggctgaccaggagaagtgtgagctgcactatgagaaaagcacagtgcctgagaagaaaggcgctgtaagtcctgttggggtacagcccatcttgaataagcataccttctgtgctggccttaccaagtatgaggaagacacttgctatggtgacgctggcagtgcctttgccgtccatgacacggaggaggacacctggtatgcagctgggatcctgagctttgacaagagttgtgccgtagctgagtatggtgtgtacgtgagggcaactgatctgaaggactgggtccaggaaacaatggccaagaactagttcagggctgactagagggctgcacacagtggggcagggcaattcaccctggaagaggaagtagaagggttggggacataatctgagggctgctagccctgcattgctcagtcaataataaaaaacgagctttggacccaaaaaaaaaaaaaaaaaaaaaaaaaaaaaaaaaaaaaaaaaaa

SEQ ID NO: 302 - DNA, 782 bp, Rattus norvegicus
cggctggagcggagcgtgagtgcgcgggaccctaggccaattcctcgaggctgcagccaggccgacctcaggctaccgtcgccccttcgctctccttgccgggagaaatagaagctcttaagaatgcctaaatcaaaggaacttgtttcttcgagctcttcaggcagtgattctgacagcgaagttgaaaaaaagttaaagaggaaaaagcaagttgttccagagaaacctgtgaagaagcaaaagcctggtgagagttctagagcactggcatcctccaagcagagtagcagcagcagagatgataacatgttccagattggaaagatgagatatgtcagtgttcgggactttaaaggaaaaattctaattgatattagagaatattggatggactcagaaggtgaaatgaaaccagggagaaaaggtatttctttaaacatggaacaatggagccagctgaaggaacagatctctgacatagatgacgcagtaagaaagctgtaaagtctgagccatatcaagcctgtactgtcgtagctgttttactctgtcttttcacattggcttttgttttctaaatgttgttttccacgctgttgtatatttggattgcagaacaatttgtaagacaaatacttttttttaatgtgcattattaaaatgttctaagtgaagctaattgtcaactttattaaagaggattgctttgtgccccttacctagtgtaaaataaagtcagatcattacaatcttaaaaaaaaaaaaaaaaaaaaaaaaaa

SEQ ID NO: 303 - DNA, 1029 bp, Rattus norvegicus
attcggctgggcccttgcccctaccccagctatggctcctggggctccctcatccagccccagccctatcctggctgccctgctcttctcttctttggtgctgtccccaaccctggccattgtggtttacacggacagggaagtctatggtgctgtgcgctcccaggtcaccctgcactgctccttctggtccagtgaatgggtctcagatgacatctcttttacctggcgctaccagcctgaaggaggccgagatgccatttcaatcttccactatgccaagggtcaaccttacatcgatgaggtggggaccttcaaggagcgcatccagtgggtaggggaccctagctggaaggatggctccattgtcatacacaacctagactacagtgacaacggcactttcacatgtgatgtcaaaaacccaccggacatagtgggcaagacgtctcaggtcacgctctatgtctttgaaaaagtgcccactaggtatggggtggtgttgggagccgtgatcggtggcatcctcggggtggtgctgttgctgctgttgctcttctacctgatccggtactgctggctgcgcaggcaggctgccctgcagaggaggctcagtgccatggagaaggggaaatttcacaagtcttctaaggactcctcgaagcgcgggcggcagacgccagtgctgtatgccatgctggaccacagccgaagcaccaaagctgccagtgagaagaaatctaaagggctgggggagtctcgcaaggataagaaatagcggttagcgggccgggcggggggtcgggggtctgcgatggagtcttccaaaggctctcaggtggtggtcatcgagatggagcttcgcaaagatgagcagagctcggagccccggcctgcagtcaaatcccccagtagaaccagcctcaagaacgccctcaagaacatgatgggcctggactcgaacaagtgaccgtcacctccaggctctgtcagagcaggggacctaggctcctctttttcccagtctag

SEQ ID NO: 304 - DNA, 6035 bp, Rattus norvegicus
tgcttcactctgccacagtcagaggtcccataggtccacagctgctgctgctgctctctgctgtcctgccggtgtgactcagccaacactatgagtagcgacaccgagatggaagtgtttggcatagctgcccctttcctccgaaagtcggaaaaggagaggatcgaagctcagaaccagccctttgatgccaaaacctattgctttgtggttgactcaaaggaagaatatgccaaggggaaaattaagagtagccaggatgggaaagtcacggtggagacagaagacaacaggaccctggtggttaaaccagaggacgtgtatgccatgaaccctcccaagtttgacaagatcgaggacatggccatgctgacccacctgaacgagcctgctgtgctgtacaacctcaaggaccgatacacgtcctggatgatctacacctattcaggcctcttctgtgtcaccgtcaacccctacaagtggttgccggtgtacacccctgaggtggtggatggctaccgaggcaaaaagcgccaggaggccccgccccacatcttctccatctctgacaacgcctaccagttcatgctgacggatcgtgagaaccagtccatcctgatcaccggagaatccggggccgggaagacggtgaacaccaagcgtgtcatccagtactttgcaacaattgcagccactggggaccttgccaagaagaaggactccaaaatgaaggggaccctggaagatcaaatcatcagcgccaaccccctgctggaggcctttgggaatgccaagaccgtgaggaatgacaactcttcccgctttggcaagttcatccgcatccatttcggcaccactgggaagctggcctctgcagatattgaaacttatctgctggaaaagtccagagtcaccttccagctgaaggctgagagaagctatcacatcttctaccagattctttccaacaagaagccggaactgatcgagttgctgctgattacgaccaacccttacgactacccattcatcagccagggtgaaatcctggtggccagcatcgatgatcgtgaggaactgttggctacagacagtgccattgacatcctgggcttcaccccggaggagaaatctggactctataaactgacaggggctgtgatgcattatgggaacatgaagttcaagcagaagcagcgagaggagcaagctgagccagatggcaccgaagtggctgacaaaacagcctacttgatgggcctgaactcttcagacctcctcaaagccttgtgctttcccagagtgaaagttgggaatgagtacgttacaaaaggccaaactgtggaccaggttcaccatgctgtgaatgctctctccaagtccgtttatgagaagctgttcttgtggatggtcactcgtattaaccagcagctggacacaaagctaccaagacaacacttcattggggttttggacattgcgggttttgaaatttttgagtataacagcctggagcagctgtgcatcaacttcaccaacgagaaactgcaacagtttttcaaccaccacatgttcgtgctggagcaggaggagtacaagaaggaaggcatcgagtggaccttcatcgacttcgggatggacctggcggcctgcatcgagctcatcgagaagccgatgggcatcttctccatcctggaagaggagtgcatgttccccaaggcgacagacacctccttcaagaacaagctgtatgaccagcaccttggaaaatccaacaacttccagaagcctaaggtggtcaaaggcaaggccgaggcccacttctccctcatccactatgcgggcaccgtggactacagtgtctcgggctggctggagaagaacaaggaccccctgaatgagaccgtggtggggctgtaccagaagtcttccaacagactcctggcccatctctatgccaccttcgctacgacagatgctgacggtgggaagaagaaagtcgctaagaagaaaggctcttccttccaaacagtgtctgcgctgttcagggaaaacttgaacaagctgatgtccaatttaagaaccactcacccacactttgtgcgctgtataatacccaatgaaaccaagaccccaggggccatggaacacagcctggtcctgcaccagctgaggtgtaacggggtgctagaaggcatccgcatctgcaggaaggggttccccaacaggattctgtatggagactttaaacagagataccgagtgctgaacgccagtgccatcccggagggccagttcattgacagcaagaaagcttgcgagaagctcttggcttccattgacatcgaccacacacagtacaaatttggacacaccaaggtgttctttaaggctggcttgctgggaaccctggaggagatgcgggatgagcgtctggccaaactgatcactcggacacaagccgtgtgcagagggttcctcatgcgtgtggaattccagaagatgatgcagaggagggaatccatcttctgcatccagtacaacatccgcgccttcatgaacgtcaagcactggccctggatgaaactcttcttcaagatcaagcccctgctgaagagcgccgagacggagaaggagatggccaccatgaaggaggagttccagaagaccaaggacgagctcgccaagtcggaggcaaagaggaaggagctggaggagaagctggtcactctggtacaagagaagaacgacctgcagctccaagtacaggcggagagtgagaatttgctggatgccgaggagcgatgcgaccagctgatcaaagccaagttccagctggaggccaaaattaaagaggtgaccgaaagagctgaggatgaggaggagatcaacgccgagctcacggccaagaagaggaagctggaggacgagtgctcggagctgaagaaggacatcgatgaccttgagctgacactggccaaggttgagaaggagaagcacgccacggagaacaaggtaaaaaaccttaccgaagaactggcaggcctggatgaaactattgcaaagctaacacgggagaagaaggccctccaagaggcccaccagcagaccctggacgacctccaggctgaggaagacaaggtcaattctctgagcaagctcaagagcaagctggagcagcaagtggatgatttggagagctccctcgaacaagagaagaagctgcgtgtggacctggaaaggaacaagaggaagctggagggagacctgaagcttgcccaagagtccatattagatctggagaacgacaagcaacagctggacgagaggctcaagaagaaggactttgaatatagccagctgcagagcaaggtggaagatgagcagacgctgagcctccaacttcagaagaaaatcaaagagttacaggcccgcattgaggagctggaggaagagatagaggcggagagggccacccgggccaagacagagaagcagcgcagcgactacgcccgcgagctggaggagctgagtgaacgtctggaggaggcgggcggtgtcacctctacccagattgagctgaacaagaagcgtgaggctgagttcttgaagctgcgcagggacctggaggaggccaccctgcagcacgaggccaccgtggccacgctgcggaagaagcacgcggacagcgcggcggagctggcagagcagatcgacaacctgcagcgcgtcaagcagaagctggagaaggagaagagcgagttcaagctggagatcgacgacctctccagcagtgtggagagtgtgtccaaatccaaggccaacctggagaagatatgccgaactctagaggatcagttaagcgaggccaggggcaagaacgaggagacgcagagaagcctaagtgagctgaccacacagaagtcccggctgcagacagaagcgggtgagctgagtcgtcaactggaagaaaaggaaagcatagtatctcagctttccaggagcaagcaagcctttacccaacagatagaggagctcaagaggcaactggaggaagagaacaaggccaagaatgcgctggcccacgccctgcagtcctcccgccacgactgtgacctgcttcgggaacagtacgaggaggagcaggaaggcaaagccgagctgcagagggcgctgtccaaggccaacagcgaggtggcccaatggaggaccaaatatgagacggatgccatccagcgcacggaggagctggaggaggccaaaaaaaagcttgctcagcgccttcaggattcggaggagcaggtcgaggctgtgaatgcaaaatgcgcttccttggaaaagaccaagcagaggctgcaaggggaggtggaggacttgatggtggatgtggagagagccaactctctggctgccgctctggacaagaagcagaggaactttgacaaggtgttagccgagtggaagacgaagtgtgaggagagccaagcagagctggaggcggctctcaaggaatcccggtccttgagcactgagctcttcaaactgaaaaacgcctatgaagaagccttggatcaactcgaaactgtgaagcgagagaataagaacttagaacaagagatagcagatctcaccgaacaaattgctgagaacggtaaaagcatccacgagctagagaaatccagaaagcagatggagctggagaaggctgatatccagatggcgctggaggaagcagaggcagctctggagcacgaagaagccaagatcctcaggatccagcttgaactgacgcaggtgaaatcagagatcgatagaaagatcgcagagaaggatgaagagatcgagcagctgaagaggaactaccagaggacagtggagaccatgcagggcgccctggatgctgaggtgcgcagcaggaatgaggcgatccggctgaagaagaagatggagggcgacctcaatgagattgagatccagctgagccatgccaaccgccaggccgcagagaccatcaagcacctccggagtgtccagggacagctgaaggacacccagctgcacctggatgacgctctccgaggccaggaggacctgaaggagcagctggcgatcgtggagcgcagagccaacctgctgcaggctgaggtggaggagctgcgggccactctggagcagacggagagggcccggaagctggcagagcaggagctgctggactccaacgagagggttcagctgctgcacacccagaacaccagcctcatccacaccaagaagaagttggagactgacctcacacagctccagagtgaggtggaggatgccagcagggacgcaaggaacgccgaggagaaggccaaaaaggccatcactgatgccgccatgatggcggaggagctaaagaaggagcaggacaccagcgcccatctggagcggatgaagaagaacctggagcagacggtgaaggacctgcagcaccgtctggacgaggctgagcagctggcactgaagggcggcaagaagcagatccagaaactggagacgaggatcagagagctagagtttgagctggaaggggaacagaagaggaacacagagtctgtgaagggcctgaggaagtatgagcggcgtgtcaaggagctcacctaccagagtgaggaggacaggaagaatgtgctgagattgcaggatctggtggataaacttcaagtgaaagtcaagtcctacaagaggcaggctgaggaggctgatgaacaagccaatgttcatctcaccaagttccggaaagcccagcatgagctagaggaggccgaggaacgtgcggatattgcagaatcgcaagtcaataaactgcgggctaaaacccgggacttcacctctagccggatggtggtccatgaaagtgaggagtgagcatgtcctcctggtgaggggcagaagatatgcagaatgtatgttttcgtggctcctgaccatcctgcttaatttccacgtaacccctttccacatgcaataaaatttgccttgtttcaagt

SEQ ID NO: 305 - DNA, 909 bp, Rattus norvegicus
acagacatccacggacacaccatgatcaggacactgctgctatctgccttggtggctggagctctcagctgcgggtaccccacttatgaggtccagcatgatgtgagcagggtagttgggggtcaagaggccagtcccaacagctggccctggcaggtctccctgcagtacctttcctctggaaagtggcaccacacctgcggaggctccctggtggccaacaactgggttctgaccgctgcccattgtatcagcaactctaggacctaccgcgtgctgctgggccgacacagcctctccacctcggaatccggctcactggctgttcaggtctccaagcttgtggtccatgagaagtggaacgctcaaaagctctccaacgggaatgacattgccctggtcaaactggctagcccagtggccctgaccagcaagatccagacggcttgcctcccacccgctggtaccattctgccaaacaactacccctgctacgtcacaggctggggccggctgcagaccaacggagccactcctgacgtcctgcagcagggccgtctgctggttgtggactatgccacctgctccagcgctagctggtggggaagctccgtgaagaccaacatggtgtgcgctggtggcgacggtgtgacctccagctgcaatggggactccggcggaccactgaattgccaggcatctaatggccagtggcaggtgcacggtattgtgagctttggctccactctgggctgcaactacccccgtaagccatctgtcttcaccagggtctccaactacatcgactggatcaactcggtgattgcaaagaactaagcaaaggcatctctgtgactgtcaccttgggaacgcacggaagggacacagtaataaagtgacttacgaatt

SEQ ID NO: 306 - DNA, 741 bp, Rattus norvegicus
atgagagcactcctgttcttggctcttgtgggagctgctgttgcttttcccgtggatgatgatgacaagatcgttggaggatacacctgccaagagaattctgttccctaccaagtgtccctgaactctggctaccacttctgtggaggttccctcatcaatgaccagtgggtggtgtctgcagctcactgctataagtcccgcatccaagtgagactgggagagcacaacatcaatgtccttgagggcaatgagcagtttgtcaatgctgccaagatcatcaagcatcccaacttcgataggaagaccctgaacaatgacatcatgctgatcaagctctcttcccctgtgaaactcaatgctcgagtggccactgtggctcttcccagctcctgtgcacctgcaggcactcagtgcctcatctctggctggggcaacacgctcagcagtggcgtcaatgaaccagacctgctccagtgcctggatgccccactgctgccccaagctgactgtgaagcctcctaccctggaaagatcactgacaacatggtctgtgttggcttcctagagggaggcaaggattcctgccagggtgactctggtggccctgtggtctgtaatggagagctgcagggcattgtctcctggggctatggctgtgccctgccagataaccctggtgtgtacaccaaggtctgcaactatgtggactggattcaggacacaattgctgccaactag

SEQ ID NO: 307 - DNA, 2549 bp, Rattus norvegicus
ggggagagccgccctgatgtatatatgcaatagggagccgtgaatcggccctttgatacagtaatataataaaagcggactggcaagcggtgcgtcttagttctctactctcttgtgggaatgagttgccaacctttcacctcggctgatacctttatacctctgaattctgacgcttctgctgccctgcctctgagaatgcaccacaatgccgctgagggtctcccagcctccaaccacgccaccaacgtgatgtccacagcgacaggacttcattattctgtgccttcctgtcattatggaaaccagccatccacctacggagtgatggcaggcactttaaccccttgtctttacaagtttccagaccacaccctgagtcatgggtttcctcccctgcaccaacctctgctggcggaggacccaacagcctctgaatttaagcaggaactcaggcggaaaagtaaattggtggaagagccaatagacatggactccccggaaatccgagaactggagcagtttgccaacgaatttaaagtgagaagaattaagttaggatacacccagacaaacgtgggcgaagctctggccgctgtccacggctccgaattcagtcaaacaaccatctgccgatttgaaaacttgcagctcagtttcaaaaatgcttgcaaactgaaagcaattttatccaagtggctggaggaagctgagcaggtcggagctttgtacaatgaaaaagtgggagcaaacgaaaggaagaggaaacggaggacaactatcagtatcgccgctaaggatgctttggagagacactttggagagcacagcaaaccttcttcgcaggagatcatgcggatggctgaagaattgaatctcgagaaagaagtagtaagagtgtggttttgcaaccgaaggcagagagaaaaacgggtgaaaacgagtctcaatcaaagtctgttctctatttcaaaggagcatcttgagtgcagataagacttgcctgtggtagccatgtgtggtagcctttccattcctttctgatttcaagaaaaatcagaagttacttagcttcataaactagattaaatcagcaacccctgcagtttttgtttcactttctttctttcctttttagatccaatgatttaaaacaagacgttttatttagttgttctcagaattcatagcattgcctttactcctaaatcatcaccaagaatgctcacaatacctcttccaattctgcctttatacctaatacacagagaggtggggataactgggagagaggccatcatatatgcgaatattttgagtttaaaattaccttttgtaagtcaatttattgttctttaaattttaatcagtaaggacaaatatttaccgactattaaccagggatggctcaagttgataatctattgacttggccagagagatgtctcagtggttaagagcatctgttgctcttccagaggatgtgggttccatcacctatacagctcacaactgtctgtcacactatttccagaggaaatccaaggagtctcctgggttccattgacacttggcctgaaaatggagcacagacatacatgtagacaaaatactcatacatatacagtaaaaataataaatctataaacaaaaagaaaatatattggtttatactcagtatgcccctagcactatgttttgttttgttttgttttgttttggagtaaggtttgacaatccagaggtgactagagacaactaagaattttattaattgccttcagaaataatcttcagtcagaatctattgatatctttgacattaacacttaggacgcgttttttgaacaatttgtaggagcatttaggcatgacatctgggcgtattcttttatacacattagctttctgaggctctgctacagaaaacatgtgagctgcaagctaaacttgctgacacaataatccttcagttttggctttgttttgttttgtttggtagtgagttcaatcctgagcacaagtgaaatttaaaaatgaaaaatatggtttagggatccctaacctatatcataaatctgtgtggaagctgcactagggcgaggctacgtggcttacttgctgttatgtttccagtgactgaaaaagcactcgctcctagtaggtatgtatagaccatgctaaaggaatgggcccaatggtgaacaaccgctacaaatatgaagggtaccaggcaacctgaaaaatctaacttgtttttgaagtctcattgtagaaactcacctgaggttccttaacaaagtgtcaattttggtctcactggtcacattttgatttattaataaaaattggaaatatggaaaaaaaaaaaaaaaaaaaaaaaaaaaaaaaaaaaaaaaaaaaaaaaaaaaaaaaaaaaaaaaaaaaaaaaaaaaaaaaaaaaaaaaaaaaaaaaaaaaaaaaaaaaaaaaaaaaaaaaaaaaaaaaaaaaaaaaaaaaaaaaaaaaaaaaaaaaaaaaaaaaaaaaaaaaaaaaaaaaaaaaaaaaaa

SEQ ID NO: 308 - DNA, 2935 bp, Rattus norvegicus
ctaggtcagcatggattcctggttcattcttatcctgtttggcagtggtctaatacacattagtgccaacaacactactacagtttcaccttctttaggaactacaagattaattaaaacatcaacaacagaatcggctaaggaagagaataaaacttcaaattcaacctcttcagtaatttctctttctgtgacaccaacattcagcccaaatctaactctggaacccacctatgtgactactgttaattcttcacactctgacaatgggaccaagagagcagccagcacggaatctggaggcactaccatttcaccaaacggaacatacggaacatggcttactgataaccagttcacggatgccagaacagaaccctgggaggggaattccagcagtgcagcaaccactccagaaaccttcccccctgcagatgagacaccaatcattgcggtgatggtggccctgtcctctctgctagtaattctctttattattatagttctgtacatgttaaggtttaagaaatacaagcaagctgggagccattccaattctttccgcctgtcaaatggccgcacagaggatgtggagccccaaagtgtaccacttctggccaggtccccgagcaccaacagaaagtacccaccactgcctgtggacaagctggaagaggagattaaccggagaatggctgatgacaataagctcttcagagaggaattcaacgccctccctgcctgtccaatccaggccacctgtgaggctgcctccaaggaagaaaacaaggaaaaaaaccgatatgtaaacctcctgccttatgaccactccagagtgcacctgacacctgttgaaggggttccagattctgattacatcaacgcctcattcattaatggctaccaggaaaagaacaaattcattgctgcacaaggaccaaaagaagaaacggtgaatgatttctggagaatgatatgggaacagaacacagccaccattgtcatggtgaccaacctgaaggagagaaaggagtgtaaatgtgcccagtattggccagaccaaggctgctggccatatgggaatgtccgtgtgtctgtcgaggatgtgactgttctggtggactacacagtacggaaattctgcatccagcaggtgggcgacgtcaccaacaggaagccacagcgcctcatcactcagttccatttcaccagctggccagactttggggtgccttttaccccaattggcatgctcaagttcctcaagaaggtgaaagcctgtaaccctcagtatgcaggggctatcgtggtccactgcagtgcaggtgtagggcgcactggcacctttgttgtcatcgatgccatgctggacatgatgcattcggagcgcaaagtggatgtatatgggtttgtgagccggatccgggcccagcgctgccagatggtccagacagacatgcagtacgtcttcatataccaggcccttctggagcattatctatatggcgacacagagctggaagtgacttccctagacacccacctgcaaaaaatttataacaagatcccaggaactagcaacaatggactagaggaggaatttaagaaattaacttcaatcaaaatccaaaatgacaagatgcgtactggttaccttccagccaacatgaagaagaaccgagttttacagatcattccatatgaatttaacagagtgatcattccagtcaaacggggcgaagagaacacagactatgtgaacgcatccttcattgatccgtaccggcagaaagattcctacatcgccagccagggccctcttctccacacaactgaggacttctggcgaatgatctgggaatggaagtcctgctccattgtaatgctaacagaactggaagaaagaggccaggagaagtgtgcccagtactggccatctgatggcctggtgtcctatggagacatcacagttgagctgaagaaggaggaggaatgtgagagctacactgtccgagacctcctggtcaccaacaccagggagaacaagagtcggcagatccggcagttccacttccacggctggcctgaggtgggcatccccagcgatgggaagggtatgatcaacatcatcgcagcagtgcagaagcagcagcagcagtcagggaaccatcccatcactgtgcactgcagtgccggggcaggacggacagggaccttttgtgccttgagcacagtcctggagtgcgtgaaagcagaaggaattttggatgtcttccaaactgtcaagacgctgcggctgcagaggccacacatggtccagatactggaacagtatgaattctgctacaaggtggtacaggagtacatcgatgccttctcagattatgccaacttcaagtgacaggggagaaggcccacagacaggagaattgcctttaatattttgtaatatctgtttttgttaatatacccaaaattgtatatatcttataactgttttggaaatggcacataggcttctattacctattaggtggagattttgtatgtaaatgtgttagcactatagtccttttccagtgttttattggggaattaaatagtgcgatatttgagttgatttaatgaagtccttagcctggaaattgggccagattattctttgcttcaaatgtctttttctaaagaagacaaacataagagtcattccaggtaactcggtgccaactaaaacaaagcacaaagttctcggagctcttgaggaaatggttgtctcacgtccccaggccggcctcttcccttccctgtccctctccagtgcaccctcatctcccaccaatatcagccacctcaggagtggggaataatgagaccagagcagcatccctggcaccacactaggaatcatcaggtaataaacactcttgattcccgg

SEQ ID NO: 309 - DNA, 1624 bp, Rattus norvegicus
cagcaccatgacagatcaggcttttgtgacgctcaccacaaacgatgcctatgccaaaggggcgctggtcctgggctcatctttgaaacagcacaggactactaggaggacggttgtactcgccagcccacaggtttcagactccatgagaaaagttttagagactgtctttgatgaagtcatcatggtagatgtcttggacagtggtgattctgctcatctaaccttaatgaagaggcctgagttgggcatcacgttgactaaactccactgctggtcactcactcagtattccaaatgtgtgttcatggatgcagatactctggttctctcaaatattgatgatctttttgaaagagaagaattgtcagcagcaccagacccagggtggcctgactgtttcaattctggagtctttgtctatcaaccctcaattgaaacgtataaccagctgttgcatcttgcttctgagcaaggtagttttgatggtggggaccagggcctactgaatacatattttagtggctgggcaacgacagatatcacaaaacacttgccatttgtgtataacctgagcagcctctcaatatactcctacctcccggcatttaaagcgtttggtaaaaatgccaaagttgtgcacttcctgggacgaaccaagccatggaattacacgtacaatccccaaacaaaaagtgtcaaatgtgaatcccaggacccaattgtgagtcacccagagtttctgaacctgtggtgggacaccttcaccaccaatgtcttacccctgctccaacaccatggccttgtcaaagatgccggttcctatctaatgatggaacatgtcacaggagccttgtcagacctgtcctttggggaggccccacctgcatcacagccttctttgtcctcagaagaaaggaaggaacggtgggaacagggccaggctgattatatgggagcagattcttttgataacatcaagagaaaacttgacacttacctacagtagaagcactgccattttcttgtggacacatccatgtcttaggcacgtttcgatacatagtatgtgaagtctgttacaattgttagaggctttcactaaacctcagcagatgaggggtttgggcaggacaacaggtgagaactgggcaaatgttattaagtaataattctattatgtggacaagtgttgtgtttaaccctagactttttcaaaaactctaaattcttaaattgccaatgtgtgataaagaaaagccaacattgagctactaaattaggctctttcaaatggtgcagaacttgactctccatcttcaaaacaaggtatgagattctccaatatttgcttgttgtatccttcactagacctgcaatgtagaattgttcaaagcctgtcagagaagtagccttctagactaaagtggcctttattaacactgcggagtgattcataagcctaccagctagtgttagttcaccagttttctatgcaccatgaaggcggcatgcagacctgctctttctcagttatctacttgaaaattgcagtgtgctctctgatggtagctgtggaagcactgtgtataacaaataaagacttattgacataaaaaaaaaa

SEQ ID NO: 310 - DNA, 3829 bp, Rattus norvegicus
cgggtgctctccccaccccgcgaggggggaggggagcgcttcggcccctttaaggtgcggcgctcggcgaagtgcgggcaggcggcccgcgagccggcgcggggccaggagccgggtagggaagtcctgcctccccctccgcccgcaccggcccgcgccctccgcccaccgcgccgcgagggccatgcggcgcctctgaaccatgtcgtcctcctacgccaagaacggggcggcggacgggccgcactcccccagctcgcaggtggcccgaggcaccacgacccggaggagcaggttgaaaagatccgatggcagcaccacttccaccagcttcatcctcagacaggggtcagcagattcctatacaagcaggccatcggactccgatgtctctttggaagaggaccgggaagcgattcggcaagagagagaacagcaagcagctatccagcttgagagagcgaagtccaaacctgtagcttttgcggtgaaaacgaatgtgagctactgtggtgccctggatgaggatgtgcccgttcccagcacagccatctcctttgacgccaaggactttcttcacattaaagagaaatataacaatgattggtggataggaaggctggtgaaggagggctgtgagatcggcttcatcccaagtccactgcgtttggagaacatacggattcaacaggaacagaaaagaggccgttttcatggcgggaaatcgagtggaaactcttcctccagtctgggagaaatggtgtcaggaacatttcgagcaactcccacaacaacagcaaaacagaagcagaaagtgacggagcacattcctccgtatgatgttgtgccatcaatgcgtcctgtggtgttagtagggccatcactgaaaggttatgaggtaacagacatgatgcagaaagccctctttgatttcctgaagcacaggtttgatgggaggatatcaataaccagagtgacagctgacatttctcttgctaagaggtctgtcctcaacaatcctagcaagagagcaataattgaacgttcaaacaccagatccagcctagcggaagtacagagtgaaattgaaagaattttcgagttggcaagatctttgcaattggttgttctcgatgcagacaccatcaatcacccagcacagctgataaagacatcgttagcgcccatcatcgtccacgtgaaggtctcgtccccaaaggttttacagcggctgattaagtccagaggaaagtcccagagtaaacacttgaatgttcaactggtggcagctgataaactggcccagtgtccccctgaaatgtttgatgttatattagatgagaatcaacttgaggatgcctgtgaacatctgggagagtacctggaggcatattggcgtgccacccacacaagcagtagcacccctatgaccccattgctggggaggaacgtgggctccacagctctctcaccgtatcccacagcaatctctggactacagagtcagcggatgaggcatagcaaccactctacagagaattctccaattgaaagacgaagcctaatgacctctgatgaaaattaccacaatgagagggcccgcaagagtaggaaccgcttgtcctccagctcccagcacagccgagatcactaccctctggtggaagaagattatcctgactcataccaggacacttacaaaccccataggaaccgaggctcacctgggggatgcagccatgactcccgacataggctttgaggctgcccaaacaaacaaacaaacaaacaaacatcatctgttgacaatttgccatagtactgctaagataaaccagtcatcttaatttggcaagcatggcacagtatctgctgtgcgggtggtctgctgtcgtttgatgtaaggggcaagaattaaatagaagtacattatgcccttgagtctaggagggtattagatacccggtcatataggtatttttaagtgctacatttacatgataacagtaccttttgttttcttcatagattttagacacatcaatttgtaatttagggtactgatcaaggcacatataaaataatttcccgtgtaggaaattccaaatgaccagttccagttggaaccaatttataaaccaattcctgttggaatttgggtgaattgactggaaagtctacctgagcatgttgaaatcaattgaaaaaatcagagaagaaaaaaatacccaataaggaaatcaaaatactaatagaaaccaaacccagctatggtatttgtttgctggaagctaaatttacacttcaagttggaatgtagaaacattttaataatgttgctggaatggcttttcaaacttaccaaatatattgatagtgccaaaaaaaaatctcagaaatcttaatgcagaaattatataatcgcctcagattttaatatttttatttttcctgatatagctgttgtattcaaagtgttttgccttctgttcagtcagtactgttagccagtttgaagttgacaaaatccaggggatatttgagaagtggtaaagagaagccctagcatggacagttccagagagtggagaatgaggtgttgttccttctgcagtcagtctgcacacagctgcacacatctggagacctggtgtcaggtagcagagatgtggcggggcctctctggctacaacggtaattggcttcagatgggaagtcgtccatcgtacagcacaccgacacgggcttaggagctgtgccagcatggctgagtgtctttccctcacttcagccagtctccatctttgaatataatgaatgttttggccctgcatcacacttcttttatgtttcatgggcataatcaaattaggtactgaaagttatgttttcacaaaataattaggaaaacttaaaacactgaattaaaatcttgcagagaaagaaaaaaaaaccctcatagaatcagaatatatttattcactaaaagcaagacagtttcaatacacggcattagagagagttgagagactgctcggttccattgatagtgaacagcctttagacttctatgagtgtatttatggaattgatgacctatgtcctatgttattaaagacagctttaatccaagaaattagtgaaattgaccctttgaaacaaatgtctttctgaaagggcttgtttctgaaatgacgcaatacatgtgttttctaaagacccaattggagctagacgtaaagtctctttctactaatgctttgaagtcaatttccgaaacaagtataattaatagtatgttaatttctccaaaaaaaagacatgggtcctcaaaactgtgtaccagttcattaattctcctgatcaagagtctaagtttcatattcttaatcagttatcctatctcggatcccatcaacccattgtcttgactgtatgtgcaacccattatgaacctgcttatctgataatgaggctgcctgaaattttgtggtaatctcaaacatttgatacatttaaacacgggctcagtcaaattgacaagctaacatctgacactggcttgtgaagcttttttgtcatccagcgaggcttacagaattttctgttaagacatttaacagagctgtattcattgggctctttaataagcatataatcttccattaccaaatactttgttagaagacagaagagcatttttccagcgaacaaactatatttattacatgtatagcacatatttgcatgagaaagaaaaacattagccaaacattttcctgtatgctttactggtttcttgtttgtgcgcattaaagcatttaattgc

SEQ ID NO: 311 - DNA, 4187 bp, Rattus norvegicus
gacacaaatggtctggcggcggcggcggaggaggaggcggaggcgcaggggggacccggggcggctaggctgcccagagttgcgcgctcctctgcggggctgcggccactagcaaggcgctgccgggcaagagccacagcccgccgcgggccgggaaagagggacgcgaccccggcccgcccagaccactcctgctctcctcgccgcccgcgcttcatgaaccgcaagtttccgcggcggcggcggcggctgcgggacgcggagcagaatcccggggagcgggcagagcgcggctttagcccgacggagggcacgggcgagaaccagatctccccgaacacagtgggaactgccacccgccacgccgctgcctgccctagccgaccggcgccgaggagggagccgaaaaagtatggctgaggaggcggtgcctagcgagtcccgggccgccggccggccgagcttggaactttgtgccgtagcactccccggccggcgggaggaggtggggcaccaggacacggctggccaccgccggccccgggctcactcccggtgctgggctagagggctactgctgcttctttggctgctggaggctcctctgcttttgggggtccgagcgcagccggcgggccaggtatccgggccgggccagcaacgtccgccgccgccccagccacagcagggcgggcagcagtacaacggcgaacggggcatctccatcccggaccacggctactgtcagcccatctccatcccgctgtgcacggacatcgcgtacaatcagaccatcatgcccaacctgctgggccacacgaatcaggaggacgccggcctggaggtgcaccagttctacccgttggtgaaggtgcagtgctcagccgagctcaagttcttcctgtgctccatgtacgcgcctgtgtgcacggtactggagcaggcgctgcctccctgccgctccctgtgcgagcgcgcccagggctgcgaggcactcatgaacaagttcggcttccagtggccagacacgctcaagtgcgagaagttccctgtgcacggcgcaggagagctgtgcgtgggccagaacacttccgacaaaggcaccccgactccctccttgctgccggagttctggaccagcaatccgcagcacggcggcggtggttaccgcggcggctacccgggaggtgccggccccgtggagcggggaaagttctcctgcccgcgcgccctcagggtgccttcctacctcaactatcactttctgggggagaaggactgcggcgcgccctgcgaacccactaaagtatacgggctcatgtacttcgggcctgaggagttgcgcttttcgcgcacctggataggcatctggtcggtgctgtgctgcgcctccacgctcttcacggtgctcacgtacctagtagacatgcggcgcttcagctacccggagcggcccattattttcctgtccggctgttacacagcggtggcggtggcctatatcgccggctttctgttggaggaccgggtggtgtgcaacgacaagtttgcagaggacggggcgcgcacggtggcgcagggcactaagaaggaggggtgcaccatcctctttatgatgctctacttcttcagcatggccagctccatctggtgggtaatcctgtccctcacctggttcctggcagccggcatgaagtggggccacgaagccatcgaggccaactcacaatattttcacctagccgcctgggctgtaccagccattaaaactataaccatcctggcgctgggccaagtggatggcgacgtactgagtggagtgtgttttgtggggctcaataacgtggatgctctgcggggctttgtgctggcgccgctcttcgtctatctgttcatcggcacctctttcctgctggctggtttcgtgtcgctcttccgcatccgcaccatcatgaagcatgacggcaccaagacagagaaactggaaaagctcatggtgcgcatcggagtcttcagtgtgctctacaccgtgccggccaccatcgtcatcgcctgctacttctatgagcaggcctttcgggaccagtgggagcgcagctgggtggcccagagctgcaagagttatgccatcccttgccctcacctccaaggaggtggaggcgtcccaccacacccacccatgagccccgactttacagtcttcatgatcaagtatctcatgacgctaattgtgggcatcacatcaggcttctggatctggtccggcaagacactgaattcctggaggaagttctacacgaggcttaccaacagcaaacaaggggagactaccgtctgaaacccagaatcttacctgcccttttctggccggatcccagctatcgcctgaaagctagctccaaggaattcctgccaagcctagtcactccaggcttcctcgccagacacacacttttgcaggctcctttttcaacaaacagcacaggttctgcaaaagcttccgtccctggggtaaaggaacgagagggcccaactgctagaggggtttgtttgtgtggacagacctctctagccctcgctccgatactaggactgtacccttttatgattgtaaataacctgtgtaagatttttgtacgtatatttgtatttaaatattatcgaatacgcgttttttctttttaaaaatgtttaattatttagggcgatttaagcatctcggagcttttctcacttgctgtttcctgcggactgtagaggaagtaacacagaacacatttgatgagtgctttgccctgtgccctcatccttgttatgggagcatgggcctggctcttgcactgagggctgtgacaggggctgcctctccagggtcaattccttcaggttctttccgcccctcccctttcttgcttgcagtgggaaattttaaggtgcagaactccataaagtttccagatcccgaggtgggccccgctattccagttcctccccctttcagctgtagagtgtggagggctgtccctgagacttcatgatgctgcttttttgagaatcacctttcaacttcattagaggccccagcatgggcacagccagttaacccagcctccctctactctggtgtccctcgcccagtttctttctccttccacctaagttggtcagagggaatgcagtcaccagtaccaaactttggaaagtctgactttttaatggatgagctcatatttactttctagtgtctggaacctgctatgggtctggtccccatcgtggaaagtgcagcaagctttgtgggttgggacagatataaaacgttagttctaattgcattctgatgtctggcaatcaatctcctttcttcccccggtgatgctgcttgcttcttgcttttacccttctatgagatgcagacatcgaggtcacccggcaagtttggtgaaggagttggtttttaccttcctaaacgggatagtagaacatgaccagaacatgaaaactgaaggagatttcagtggagcgcagttcctccaagtgaaacggctgttttctggttttaaccgaactgcaattagacataaatcagtcgtcaacaatctaaaagttctacactatcaacattatgcttacttctcagcagcacattctgagggaggagcagtcacacccccacagaaagcctgggacttccgaagacagaggaggtggactgactgatgggtgagagaaacaaacacaaactgggcatgcatgctgaaggggaagtgtgtccattcctactgcgtcccatctgtgtgctctgtctggattcacggcagtgtgttcaatgtaaatctctcagagccatttaaaaatactcactttagttctccatgaagaagaggaaaaaaagcagtcctcccgattgtagtattcaaacttttaagagtttatcacaaatgccggtacataggacctaaatttatctatgtctgtcatacccttaaatgacattggttttgaatttggtatgcgttattattattattgttattattattattctcaccaccatgagatcatctatatttatagaggaatagaagtttatatatataaaatgccatatttttaatttcgcaaataaaaaaagtgaaagttttggaattccggaattccggaattccggaattccggaattccgg

SEQ ID NO: 312 - DNA, 1307 bp, Rattus norvegicus
gcacgagagccacaacgcagccttgcagaaaacagagcttcagcatgcttggctcagcactgctatgttgcctgctcttactggctggagtgaagaccagcaaaggccattccatccggggtgacaataactgcacccacttcccagtcagccagacccacatgctccgagagctgagggctgccttcagtcaagtgaagactttctttcaaaagaaggaccagctggacaacatagtgctgacagattccttactgcaggactttaagggttacttgggttgccaagccttgtcagaaatgatcaagttttacctggtagaagtgatgccccaggcagagaaccatggcccagaaatcaaggagcatttgaattccctgggagagaagctgaagaccctctggatacagctgcgacgctgtcatcgatttctcccctgtgagaataaaagcaaggcagtggagcaggtgaagaatgattttaataagctccaagacaaaggtgtctacaaggccatgaatgagtttgacatcttcatcaactgcatagaagcctacgtgacactcaaaatgaaaaattgaaccacccggcgtctactggactgcaggacataaatagagcttctaaatctgatccagagatcttagctaacgggagcaactccttggaaaacctcgtttgtacctctctccaaaatatttattacctctgatacctcagttcccattctatttattcactgagcttctctgtgaactatttagaaagaagcccaatattataattgtacaatatttattattttttaatctgtgttgtttaagctgtttccataggggacattttatagtatttgagtgttcaaagggaaattatattatataatgggaggggagcttccttgggaagcaactgaaacttcgatcctaaggctggccacacttaagagctgcagagctgtttaccaatggtgtcctttcacttgccctcatccctgaattcaggactcctgggagagttgtgaagactctcatgggtcttgggaagagaaaccaggttgctccttccatgattatccttgcaacagctcagcgcatctccctgccatcactctgcaaccacttccagtctcgaaagctgtgaccagtttgttatttataaccacctagaattagttctaatagaactcatttttaactagaagtaaatcaattcctcttgggaatggcgtattgtttgtctgcttttgtagcagatcctcgttttgaataaatggatcgtactcaaatcaaaaaaaaaaaaaaaaa

SEQ ID NO: 313 - DNA, 3617 bp, Rattus norvegicus
ttctgccccttgtagctgttctgccctcccctttaaaggttgacttgccccgcggcgctccaccgcgctctagtcctctgacgcctccggctcaaccctttgcaacgcggatccccgcccgcctgactgcccgcgcagcgcagttccagcagcaaagcagaagggcgcgccgagatggagagcaaagccctgctcctggtggccctgggagtttggctccagagtttgaccgccttccgcggaggggtggccgcagcagacgggggaagagatttctcagacatcgaaagtaaatttgccctaaggacccctgaagacacagctgaggacacttgtcatctgattcctggattagcagactctgtgtctaactgccacttcaaccacagcagcaaaacctttgtggtgatccatggatggacggtgacaggaatgtatgagagttgggtgcccaaacttgtggctgccctatacaaaagagaacctgactccaatgtcattgtagtagactggttgtatcgggcccagcaacattatccagtgtctgccggctataccaagctggtgggaaatgatgtggccaggttcatcaactggctggaggaagaatttaactaccccctagacaatgtccacctcttagggtacagtcttggagcccatgctgctggcgtggcaggaagtctgaccaacaagaaggtcaatagaattactggcttggatccagctgggcctaactttgagtatgcagaagcccctagtcgcctttctcctgatgatgcggatttcgtagatgtcttacacacatttaccagggggtcgcctggtcgaagtattgggatccagaaaccagtagggcatgttgatatttatcccaatggaggcactttccagccaggatgcaacattggagaagccattcgtgtaattgcagagaaggggcttggagatgtggaccagctggtgaagtgctcgcacgagcgctccatccatctcttcattgactccctgctgaatgaagaaaaccccagcaaggcatacaggtgcaattccaaggaggcctttgagaaagggctctgcctgagttgcagaaagaatcgctgtaacaacgtgggctatgagatcaacaaggtcagagccaagagaagcagtaagatgtacctgaagactcgctctcagatgccctacaaagtattccattaccaagtcaagattcacttttctggaactgagaatgacaagcaaaacaaccaggccttcgagatttctctgtatggcacagtggctgaaagtgagaacattcccttcaccctgccggaggtcgccacaaataaaacctactccttcttgatttacacggaggtggacatcggggaattgctgatgatgaagcttaagtggaagaacgactcctacttccgctggtcagactggtggagcagtcccagctttgtcatcgagaagatccgagtgaaagccggagagactcagaaaaaggtcatcttctgtgccagggagaaagtttctcatctgcagaaaggaaaggacgctgcagtgtttgtgaaatgccatgacaagtctctgaagaagtcgggctgacactggacaaaccaacaagagaagaaagcatctgagttctttgaagaccgaagaaaatgaagtaaattttatttaaaaaaaatacccttgtttgggtgtttgaaagtggattttcctgagtattaatcccagctatatcttgttagttaaatagaagacagtgtcaaatattaaaaggtggctaacacaacgtgaggaacctaatggccgatagcatgtcctccagcatcagaagacagcagagaggagaagcatgccatcttatatcccttaagaaggaatcatttgttcccaaccatacaagactccttcatgtgacccatttggtcatggtctaaaattagtaagggcctcttattttcattagatctctgaggttttaaattgagaccttctcaaagttctcttgaagtctaatatagacaacatttttttgtgctgtgagtcagatccatttctttagcagttgaaacagctggccattgtaactagttcttttaccatcaggatatagcacccctaccaaataaaataaataaataaagtgaccagggacatgtgactttgcaaaagcaatggacgacgtggctcgtggattcctgacccttagtcccaccacaacgaagtacaagtcagtagaggtacaaaacctagactgagtaattcttagtagacttcaagttttatggcttaattcctctgtcttttaaaaacgtgtcacatattataacattattctctagacagatgttgaaatgagcttgtgattcaggtgacatatgaattgagctgagagaaaataatgccctggctgattttatttctctgttttgctttcttgagaaaaggaatacttgtcccactccgtatctgagcctgaccaagaactaaactatgtacttcaggcttaccttgaactctcaaccatcctgccttggcttcctgagtgctgggagcttgataaccataattttattatcagatttttcttagtcattttcaccaatagaacacattcaatgcccaatcgttagcatttcgtttgagactcatcttgaccgtacctctgtcacacgtctaacacatcacattaatttctagtttagaagtgatcaagttcaaattctgcactgcgcaaagtacaagttttagagcaggaccattttttttttaccacgtaaaagtcgaaattactaggaaatgtgtatatcgatgcttgtacactgttgcgtgcaaagtgaggagccttctattgtgatagccatagacagtaccaggctcgttgccgctcttttgttttactataaaaaaataatgaagaattatttatgaacaagatctcatatgttcagattgcttttactattcatcaatataaaatgttaaaaaaaaaaaataaaacaagttctatctcagaggctgttgctgggaacagaaactgtgaaatgtgtgggtatctgaacacctacacacaagcaaagccccacaagagtctttgtcattcaatgtcattcagaaaggaaagagtcaagagatataccataatatgtcagagaagtagttccagatatgctggaatgctagcccttgctaggagaaagttggttgtgcctatgtaatataggacaaaagtgactggtttcattaggctcagtgtcattctaacaataaaatgatgtaccatatgtcaccagcatccccattattgctaattcatggcagtatatacgtacatatctcaatgatgctttgactttaaattttatttattagctgtaaataatgtgtgggtgtgtaaggaagcttgtaaacactggaaacgctgttgtggctatctggggtgtagatttgtggtgctaactctgtgtccacctccatcagtgattgtctcactgagccaactcactctgatgaacagcacaatggaatagcttttgaaggaagaaaataaactcacctgtgtgaagaaatgggatctgctttcaataaaatcgagaacgttttatccggaatccgcg

SEQ ID NO: 314 - DNA, 701 bp, Rattus norvegicus
cgcagctgagctcccagacttcacacaactaaacagtctgcattgtgacgatcacagaagccaaggcctcctaaaaggagacagctcgcgtttggctgcctgctgtcaactttttatctttctcttgactacttaaaaaagacttgtcttcctacttttgtcttcctggcatcatggaaaaagtccaataccttactcgctcggctattaggagagcctcgactattgaaatgccccagcaagcgcgtcagaacctccagaacctctttatcaatttctgtctcatcttgatatgtctgctgctgatatgcatcattgtgatgcttctgtgacaagctgtcgccaccgcagacctgcaccatgccaacgcagttacaacctggccctccaccacgaggggagggcagtgccgccgccttttccctgctgggacatcgtcgtgaagggtcacgatttaagagtgagactgatggcagccagtgtgatcatcgctgatcttgtaactttacacgactagtgtgccacaatgtagctgcccgtttcctcagtgtggctcataaatgtctttcctaaatacttctgacattgtagtatgagattttaattttgaaacagcactacaaaaaaagttacactttctatatccagcactagaaagttcaacttatagcattcagtttggggaataaatgaaatttaaa

SEQ ID NO: 315 - DNA, 1550 bp, Rattus norvegicus
gggcccccccgtctccgccaggctcgggaccatgaagctgctgccgtcggtggtgctgaagctctttctggccgcagtgttgtccgcgttggtgaccggtgagagtctggagcggcttcggagaggtctggcggcagcaaccagcaaccctgaccctcccactggaaccacaaaccagctgctacccacgggagctgatcgcgctcaggaggtccaggacttggaagggaccgatctggaccttttcaaagttgctttctcctccaagccacaagccctggccaccccaggaaaagaaaagaacgggaaaaagaagaggaaaggcaaggggttaggaaagaagagagatccatgccttaagaaatacaaggactactgcatccacggagagtgcagatacctgaaggagctccgtattccctcgtgccactgcctccctggttaccatggacagaggtgtcatgggctgaccctaccggtagagaaccccctgtacacatatgaccacactaccgtcttggctgtggtggctgtagtactgtcatctgtctgtcttcttgtcatcgtgggacttctcatgttcaggtaccataggcgaggaggttatgacttggaaagtgaggagaaagtgaagttgggcatggctagctcccactgaggaggatctgagctcaaggagccttcagaggatggctacttctgagatggcggttccttacaagttctacagagggaaaatacttcaccagcagccatgaagacttcttcattcattcccagttgctaccctgactgggcctcctgtaattgctctgcaaaaatatcagagcctctaagtgccaaacagactatgccccgctgggatctggatcagaagaaagcaggagcaagtgagcccttcaggccttcctgatcctccaccactgaacccactggtttgtttaaacacttagcttctggattaaagtgtcagctagtttccatatgctccaggatttttggctgaaaaaaaaaaaagaagagaggacggatgagtggtttatggactggaagagatcaacagagttgagaagctaagtgttcaagtagccacaggggatctgctgtttggaccctccagcacgctggatttgatgagctaactgtgaaatatctcaagcccgagaactcttgagttttgggacttctacccagagggaaaaataacaagtattttgttgttgttgttgtttgtttgtttttaaaatgcctcttaaattatatatttattttattctatgtatgttaatatatttagtttttaacaatctaacaataatatttcaagtgcctagactgttactttgccaatgtcctggcccgcctctcttgcagctcttccacctggctcaatgccacactcccatctgctctgtaacccatctgtagtaatttattgtctgtctacatttcagaagatgcccctgtagcagagtatcccagggtgggttgtgtatggtcggagtgcaaggatggatttgggcagagccactctgtgagttggactgcag

SEQ ID NO: 316 - DNA, 2072 bp, Rattus norvegicus
attcccgcatcttattagcaaccagggagatttctccattttcctcttgtctacagtgcggctacaaatctgggattttttttattacttctttttttaaaaaactacacttgggctccttttttgtgctcgacttttccacctttttcctccttcctggcctgctgctttttgaggcggggggcaagccttcctcggggcagccgcgtcccgggtcccgccgcgatgctgttccacagtctgtcgggccccgaggtgcacggggtcatcgacgagatggaccgcaggcaagagcgaggctccggcatcagctccgccatcgaccgcggcgacacggagacgaccatgccgtccatcagcagtgaccgggcagcgttgtgtgctggctgtgggggcaagatctctgaccgctactatttgctggcagtagacaagcaatggcacatgcgctgcctcaagtgctgtgaatgcaagctcaacctggagtcggaactcacctgcttcagcaaggatggcagcatctactgcaaagaagactactacaggcggttctctgtgcagcgctgcgcccgctgccacctgggcatctcggaatcagagatggtgatgcgcgctcgggacttggtttatcacctcaactgcttcacatgcacaacgtgtaacaagatgctgacgaccggcgaccatttcggcatgaaggacagcctggtctattgccgcttgcacttcgaggctctgctgcagggcgaatacccaccacactttaaccatgccgacgtggcacgggcggcagcggcagccgagcagctaagagtgcaggattgggctcagccggggctaacgctgggtcttccctactacaacggcgtgggcactgtgcaaaaggggaggccgagaaagcgcaagagtccaggacccggggcagatctggcagcttacaacgccgcgcttagctgtaacgagaacgatgcggaacacctggatcgtgaccagccctaccccagcagccaaaagacaaagcgcatgcgcacctccttcaagcaccaccagcttcggacaatgaagtcttactttgccattaaccacaatccggatgccaaggacttgaagcagcttgcgcaaaagaccggcctcaccaagagagtcctccaggtctggtttcagaatgcccgggccaagttcaggcgcaaccttttacggcaggaaaacacgggtgtggacaagacttcggatgccacgctgcagacagggacaccgtcagggcccgcctcggagctgtccaacgcctcgctcagcccctccagcactcctacaaccctcacagacttgactagccccaccctgccgactgtgacgtcagtcttaacttctgtgcctggcaacctggaggccacgagccccacagcccttcacaaacgactcttaccaaccttttctaatgactcgccacccccttctcccctgagcccccacgctttctttaaaaaagaaattatctttagttgaattccaagtgtattttaaaaatagcggtttgagcaactaactaaccacgttttaggatctcgcctggaaacagagggaaaaaagaattgtgcgtcgggctaacgcagcggtgtgtgctgaggaattacttgggagatatatctgcaacacaacatttgtgtccctgtacagttttgtggactgagcgaggaaaacaacaaataatttaagttggctgagagcttccgtattttcaaagactgccacgtgccttaggaatactgttttatcttcatactttggatgaattgttcgtttttttttctctccctctttttctctcttatatttatgaccagagaaaaatgtaaaaaaaggaaaaaaaaaaaaaaaaaacaaaaaaagtttgttactttgaatagtcctaaagaagaaaaagaaaaaaaaaaaaaaataaggaaaaaaatcaaatcccctccaacagtcgctttcttgttttagaattttaaggtggaagtctgttcggatatagaatttgtaaaacctaacctgtaataaaatcactcttcgaaaagaaaaaaaaaaag

SEQ ID NO: 317 - DNA, 3184 bp, Rattus norvegicus
gaatcactgactcgcccaggtgtcgggaaaatgatccacagtctatttctcatcaactgttctggcgacatatttctagaaaaacactggaagagcgttgtaagccaatctgtgtgtgactatttctttgaagctcaggagaaagctgctgatgttgaaaatgtaccacctgtcatttcaacacctcaccactacctcattagtatctaccgggataagctcttctttgtgtctgtgatacagactgaagtgccacctctctttgtaattgagtttctgcatcgagttgctgacacttttcaggactactttggtgagtgttcagaggctgcaattaaggataatgtggtcatagtgtatgagctcttggaagaaatgttagacaatggattcccactggctaccgaatctaacattctgaaagaactgattaaaccaccaacaattctacgttctgtcgtcaattctattacaggcagtagtaatgttggggacacgctccccactgggcagctgtccaacatcccgtggcgtcgagcaggtgtaaagtacaccaacaatgaagcctactttgatgtagtcgaagagatagatgcgattatagataaatcaggatctacagtctttgcagaaattcaaggtgtcattgatgcttgcattaagctgtctggaatgcctgatctctctctctctttcatgaacccaaggcttctagatgatgtcagcttccacccatgcatccggttcaaacgctgggaatctgagagagttttgtcattcattcctcccgatggaaatttccgactcatatcataccgcgtcagctcacaaaatctagtggcaatcccagtgtatgtgaaacataatatcagctttaaggaaaacagctcttgtggtagatttgatataacaattggaccaaaacagaatatgggaaaaacgattgaaggaatcacagtgactgttcacatgccaaaagttgtgctgaatatgaacctgacaccaacacaaggcagctatacattcgatccagtcaccaaggtactagcatgggatgtggggaaaattactccacaaaagctcccaagtcttaaaggactggtaaatttacagtcaggagcacccaagccagaagagaacccaaacctcaacatacagttcaagatccagcagcttgctatttcaggcttaaaagtgaaccgcttggacatgtatggtgagaagtataagccatttaaaggagtcaagtatatcacaaaggccggaaagttccaagtgaggacatgagaagaggccagacttgctcaagatcagtttgttttgcaagtgtcattgcggtttcttactattaggtaccaagtgggtgggaataatatagagcatctgggtcaagctaccctgctaacaaagttgcttagtaatgatgtaggctcctcaggagctttaagctaaggaaagttttctaaagacttagcttattttgtatcttttcacttaggaaaaggtttaggtgatttttttccatgggggccaccagctgaatgctgcccatggtaacagtcaaggcagaaggctacagtgataacctctctcctaaagcaagtgaactggtctcatcttccagcaggaactgtctcagtctatgaggtgtcagctgtagccaagggtcacaccttctgatcttagccatctcaatcagtgtctgtcccaagagaggagattgccccaccccaagaagtttacagaaaactgcctcttcaagtgtttgccttactcagcttttcacttgtgccattaagcaagcactgtagcaaaagccacttccacatggcccaggcagggagccctgcagctccatgctccattctcactgtacttggtattatattttttataaataagatttttatgtaaagctcagattttgatttacaaggaccttgctgcagtaaatattccatcaatcttgtgccaccagttcagctgttagatagcacagtcaaatcatttgcatcaaaagggcaaatactttattaagataatgaaagggaacactacttctgctgttaggcacaagtgtctgtgcttttaaacaaattcaagtagtaaaagagaaaatcaagcaaaacctttgccattctcgtgttttattaaagctttatttggtgccactaacctagttagcttgaaaccccagtttaacaaagggaaggaaacatgcatttcactgttactcttctccatcttttatgctgttgttcttaagtagttgagtttgcctgtgtgcctgcagagcgccttttcgtacaccatacattgcaaggccaaggggataacaccttctccaaactgtcaaatgtggaggaagcacttagtgtgtctgctgaactgtgtacatggaaacagtaacaatttatactaattgatctttacacttggaagccggtccttctgcgtcttcgtttggaaatccttgtgcagtgattttgcctcatcacacaaaagaaaatggaggaagacaaaaatggtcgcccttcctagccccttgtcctttgtccttccttcccttgctaggtcacgtcctaggcccgctccatgttggagtgccaacgatgcggtagctctgctgctgtggccccatctaacaaggccaactgttgcaaaacttcaaggagacacttcttgagtaaccaactgattgacaattttaagtcaaaatacaaaatatctattccctttgactaagattggttatccacttctagttttacgatcttgttccacctccaaagcaatcacaccagttctagttcttcacagttctttacctcacaaccatacctagaacgcacagcttccttgctgtgcagtcctcttgtctgtcagagtagagtatataccaagtgtcttgtgtccaggaatttctgctaaagtagctaatcagactgcattcctttactgttaagttgttgtatttattaatttgacagaactcaataagccctttctctagttctgaccataatgtcaataaatatatgagagcaacccactgatttttaggtttgattgttagtggaatagtctcatattcaggctgtattaaccggctacactggatgagtttcttctgtatcataaagtgttacagttgcctgaaaaaaaaaaaaaaaaaaaaaaaaaa

SEQ ID NO: 318 - DNA, 3295 bp, Rattus norvegicus
ccacacttctcccactggcctcttcttcaccatgattcacagtcttttcttgatcaactctgctggggatattttcctggagaagcactggaaaagcgtggtcagccgctctgtttgcgattactttttcgaggcccaagagagagctacggaggctgaaaatgtgcctcccgtcatccccacacctcaccactaccttctgagcgtttaccggcacaagatcttctttgtggctgtgatccagacggaggtcccgcctctgtttgtcattgaattccttcaccgagtagtggacacatttcaggactatttcggggtctgctctgagccagtgatcaaagacaacgtggtggtggtctacgaggtgttggaagagatgctggacaatgggttccccttggctacggagtcgaacatcctcaaggagctgataaagcctcccaccattctccggacagtagtcaacaccatcacaggaagcaccaatgtgggcgaccagcttccaactgggcagctgtcggtggtgccttggcgacggactggggtgaaatataccaacaacgaggcctatttcgacgtggttgaagagatagacgccatcattgacaaatcaggttccacagtcaccgctgagatccaaggggtgattgatgcctgtgttaaactgaccgggatgccagatctcacgctgtccttcatgaaccccaggttgctggatgatgttagcttccacccctgtgtccgtttcaagcgctgggaatctgagcgcatcctctccttcatccctcctgacggcaacttccgcctgctctcctaccacgtcagtgcacagaacctagttgccattccagtctatgtcaaacacagcatcagcttccgggacagtggctcacttggacgctttgaaatcacagtggggccgaagcagaccatggggaagaccatagagggtgtgactgtaaccagccagatgcccaaaggagtcttgaacatgagcctcactccatcccaggggacacacacgtttgacccggtgacaaagatgctgtcttgggatgtaggaaaaataaacccgcaaaagctgccaagtttgaaggggacaatgggtctccaggtcggagcttctaaacccgatgagaaccctacaattaaccttcagttcaagatccagcagctggccatttctggactcaaagtgaaccgtctggatatgtacggagagaagtacaagccctttaagggcataaaatacatgaccaaagccggcaagttccaagtccgaacctgaagggaaagtcttggtgaaggaacactcacgaacactttttcgtttcttacttgtctaaaagtaaaatgtcagcctgtttcttaggtcagttccctcaggctccatctgccccctttgtcctctgtcttcagtaccacataagtgatggagggacaggaggttcctcagggaaaacgaagccaaacccatcgcagcactgactgagtcctagagtgtgggctggagagtggtggcctgtcgcactgcatttcacctcttaacacggttgccgttgggaaaagaccggcctttgacgtttggtttcaatcacctaaccccaatggaagatgtctatattgatttttttttatgatagaaagatttgaaagagagaaaaaaaaagaatagaaaaaaatgggtgttagtccaagaaagagcagttgagatttgattggtctgggttgtaactcggtgatcaagtgccgacctgggtcctgtgcaagccctggttcattcctggtaccgtccacaatacaagacagatctgctctacgaggggcaagaccaagaagctggtgtgaagagagttgtgaagagagaggtcacagtgaagagttggtgagaacagttatcagaatctccccaggggctaggacgagcagaacgcagtgtttctttctgaccccctcttacgtgtagaaaggatttgcatgtccaggactttcaaagttcaagtccacgcttgaactgaaactgcagtgggatcagcgtcctttggagactaaggtgccacacacagcctgcctctggagattctcactcgctgtttgcgctggcccatcgtcctggtgggaaggttacctgtcagagcagcttacagccttctgctggttatctgactccttggtgggctcgccccccaaaaacagcagtgatctcggtgcaggcagatctgtgaatgatagtggcagagtcgaggtgaactactccatggacagccatgctcggtgaccaccattacattaatgtttgtgaggccggactggcctatgccttgctttttcctgtctgaaggtcccatcagaacccctgagtaggtgtgaacccaccgaggacatgcgcgagtgcacaaatgcttcccactgtctgttccggtctccagacagacagctcccagtccgttcttacaacctaaaaaggtgtcttgagcctctgaatagaataccataggagggcaggcagtgttggccacaagtagctccccattactccccagtttaaacccagcagctgaaggagcagagtatctcaatctgtttcaatgtgtcctttagtcattttactaaacacataaggtgcgggtgtgtgttgtttttaacttagagcagcctgtgctctgtattgtgcctggagggagaagaccggcttgcttcagtctgcagggctccccctgaagtcccgtttctaagtgcttgtgcttgcttgcagggctctcccctgaagtcccgtgtctaagtgcttgtgcttgcttagtttctattgtttgctagtgctctcatgctgtggccaggacttatttttgctgcccagtagagttactctgtggtttccttgtgtggtgaactgcgctgtgtacagtcagatgttccttaccaggatctggactagtgtagccccacaccctgctgcaggggacacttcaggtcactttcacaggctctgggggattccgaggtttcttgggtcataggtactatttgcatcggtccccgtgtgtgtttaggtttgtacgtgtggctcattactcccgagagcacaggatagcttgtttttccaggcagagacagggttggagtacgggctccccaggcccagacaccgtggatacagccaagcctcgccgtccccacctagtggctgtcagcagaggtggcgcaggcctctccatagctgctcgctctgtgtgtggtccatgtgtggaagcagcatttctgttgaagtcttaataaagctttaccagtcttgtgg

SEQ ID NO: 319 - DNA, 1629 bp, Rattus norvegicus
aaacagcggactacaggcaccactgccatggacagcctgttgtgggctacctgggtcctctgcttgctgaacctgtggggagttgcactgggtcacctccacctagaatgtgacttcatcactcagctgagagacgatgagcttgcatgccttcaggcggcagaggggaccaacaactcgtccatgggatgccctgggacctgggatgggctgctgtgctggcccccaactggctctggccagtgggtctccctcccctgccctgaattcttctctcattttggctcagacccaggggctgtgaaaagggactgcaccatcacgggttggtctgatcccttcccaccatatcccgtggcctgtcctgtgcccttggaactgctaacagaggagaagtcttacttctccacggtgaagatcatctacaccacaggccacagcatctccattgtagccctctgcgtggctattgccatcctggttgctctcaggaggctccactgccccaggaactacatccacacgcagctgtttgctactttcatcctcaaggccagtgctgtgttcctgaaggatgctgctgtcttccagggtgatagcacggaccactgcagcatgtccactattctgtgcaaggtctctgtggccgtctcacattttgccaccatgaccaacttcagctggctgctggcagaagccgtctacctgagctgtctgttggcctccacatctcctaggtccaaaccagctttctggtggctggttctcgctggctggggactccctgtgctatgcactggtacgtgggtgggctgcaaactggcttttgaggacactgcgtgctgggacctagacgacagctccccctactggtggatcatcaaagggcccatagtcctctctgttggggtgaactttgggctgtttctcaatataatttgcatcctgctgaggaagctggggcctgcacaaggcggcttacacacacgggctcagtactggcggctttccaaatcaacacttctccttatcccgctgtttggaattcattacatcatcttcaacttcctgcctgacagtgctggccttggcatccgtctacccctggagctgggactggggtccttccagggttttgttgttgctgtcctctactgcttcctcaatcaagaggtgaggacggagatttcacgcaaatggtatggccatgaccctgaacttctgccagctcggcggacctgcactgagtggaccacacctccccgatcgagagtgaaggtgctcacctctgagtgctaggccagccatcacaaaggccgagccccaaaaccctgcactcaaactgccatgccaccaagggcaacaaggtcctcccttccgttctcattctctgcatctgctttctctaggtccctgtataccaacctccgactttctcagttcctgtatgcccccatctgttctttcttcctatctaggctattgcccaaggcccagggaaaccaataaacttgtacatgagtgatctgcagttgagtcaatgtggctctgaaggggagctcttgtcagcagccattatttgcacttccggtgcattcctcatcccttggctgcagctgcctcattgcc

SEQ ID NO: 320 - DNA, 429 bp, Rattus norvegicus
agcctccatcaaaacatggctgtcctggtgctgttgctctgcctggtgacacttccaagctgtgtcctgtcccaggtgcagctgaaggagtcaggacctggtctggtgaagccctcagagaccctgtccctcacctgcactgtctctgggttctcactaaccagctatagtgtaagctgggttcgccagccttcaggaaaaggtcctgagtggatgggaagaatgtggtatgatggagacacagcatataattcagctctcaaatcccgactgagcatcagcagggacacctccaagaaccaagttttcttaaaaatgaacagtctgcaaactgatgacacaggcacttactactgtaccagagatcgggggatggtagttattactacagattactggggccaaggagtcatggtcacagtctcctca

SEQ ID NO: 321 - DNA, 405 bp, Rattus norvegicus
gcttcacacatgttacacagaaacatgaacatgccactcaactccttgggttggctgctactctggtttacaggtggtaaatgtgacatccatgtgacacagtctcctgcctccctgtctgcatctccggaagaaattgtcaccatcacatgccaggcaagccaggacattggtagttcgttattatggtatcagcagaaaccagggaaatctcctcagctcctgatctatagtgcaaccatcttggcagatggggtcccatcaaggttcagtggcagtagatctggcacacagtattctcttaagatcagcagactacgggttgaagatattggaacctattactgtctacagttttctagttctctcacgttcggttctgggaccaagctggagatcaaacgg

SEQ ID NO: 322 - DNA, 405 bp, Rattus norvegicus
cctcacacagatcacccacagacatggctgtgccactcagctcctggggttgttgctgctgtggattacagatgcatatgtgacattcagatgacacagtctccagcttccctgtctgcatctctgggagaaactgtcaccatcgaatgtctagcaagtgagcatatttacagtaatttagtttggtatcagcagaagccagggaaatctcctcaggtcctgatctattatgcaaatagcttgaatgatggcgtcccatcacggttcagtggcagtggatctggcacacagtattctctgaagatcaacagcctgcaatctgaagatgtctcgatttatttctgtcaacagaattatgatagtccgtacacgtttggagctgggaccaagctggaactgaaacgg

SEQ ID NO: 323 - DNA, 3665 bp, Rattus norvegicus
ccaccaggcctaacaactagaggaggcttacggccctcggaaaccacgcccccatcagtcagtccccaccctcagctgacatcagcgagtccggccctgggcgcagagcgcaggcagcgcggagccgcgccggccggccctgcgcccacgccgccccgggtctcgcggcccgccggccacccgcgccaccgggagtcgtccatggtgcagcgcatgtgggccgaggcgtccgggcccatagggggcgccgagccgttgtttcccggctcccggcgcagccgcagcgtgtgggacgccgtgcgtctggaggtgggcgtccctgacagctgtccagtggtgctgcacagcttcacgcagctcgaccccgatctgccgcgcctggagagctctacgcaggagattggggaggagctgatcaacggggtcatctactccatctccctgcgcaaggttcagctatacccaggagccaccaagggccagcgctggctagggtgcgagaatgagtcagctctgaacctctacgagacttgcaaggtgcgcacggtgaaggccggtactctggagaagctggtggaacacctggtgcctgccttccagggcagtgacctttcctacgtcaccgtattcctgtgcacctacagagccttcacaaccactcagcaggtgctagacctgctgttcaaaagatatggctgcatccttccctactccagtgaggacggcggaccacaggaccaactcaaaaatgccatctcttccatcctgggcacctggctggaccaatactccgaggacttctgtcaacccccggactttccctgcctcaagcagctggtggcttatgtgcagctcaacatgcctggctcagacctggagcgccgtgctcaccttctcctggcccagctggaggacctggagcccagtgaggttgagcctgaggccctgtccccagctccagtgctgtctctgaaaccagcttcacagctagaaccagctcccgccctgcttctgacgcccagccgagctgtggcatccactccagtacgagagccagccccggtgccagtactggcatccagcccggtggtggcgccagcctctgagctagaaccagctctggagccgcccctagaccctgagccaaccctcgcacctgctccagagctggaccccactgtctcacagagcctccacctcgagcccgctcccgtgcccgctcctgcattagagccttcctggcctctgcctgaaaccacggagaacggactgtgtgcaaagcctcacctactgctgttccctccagacttggtggctgaacagtttacgctgatggacgcagagctattcaagaaagttgtgccctaccactgcctgggctccatctggtcccagcgggcaaagaagggcaaggagcacctcgcgcccaccatccgtgccactgtcgcccagttcaacaacgtggccaactgtgtcatcaccacctgccttggggaccagagtatgaaagcttcggacagggcccgggtggtggaacactggatcgaggtggccagggagtgcagggtgctcaagaatttctcctccctctacgccatcctctctgccctacagagcaatgccatccaccgcctaaagaagacatgggaagaggtctccaggggcagctttcgagtgttccagaaactgtcagaaatcttctctgatgagaacaactactccttgagcagagagctgctcatcaaggaaggaacctccaagtttgccacgctggagatgaaccctaggagaacccagaggcggcagaaggagacaggtgtcatccagggcactgtcccctacctgggcacattcctcactgacctggtgatgctggacacagccatgaaggactatctatatgggagactgatcaactttgaaaagaggaggaaggagttcgaagtcatcgcccagatcaagttgctccagtcggcctgcaacaactacagcattgttcccgaggagcactttggagcctggttccgagccatgggacggctcagcgaggctgagagctacaacctgtcgtgtgagctggagcccccgtctgagtcagccagcaacaccctgaggagcaagaaaagcacagctatcgtcaagcgctgggagcgacgccaggctcccagcacggagctcagcaccagtagcagtgcacactccaagtcatgtgaccagctccggtgcagcccctacctcagcagcggggacatcacggacgcactcagtgtgcactcagctggttcatccacgtctgacgtggaggagatcaacatgagctttgttccagagtctcctgatggccaggaaaagaagttctgggagtcagcctcccagtcgtccccagagacctctggcatcagctcggcctccagcagcacctcctcttcgtcagcctctaccacaccggtgtctaccacacgcacccacaagcgctctgtctcaggggtctgcagctacagctcctcactgccactctacaaccagcaggtgggcgactgctgcatcatcagggtcagcctggatgtggacaacggcaacatgtacaagagcatcctggtgaccagccaggataaggctccgactgtcatccggaaagccatggacaaacacaacctagatgaggacgagcccgaggactatgagctgctgcagatcatctcagaggaccacaagctgaaaattccagagaacgccaatgtgttctatgccatgaactctgccgccaactatgacttcatcctaaagaagcgggccttcactaagggggctaaagtcaagcatggagccagctccactctccctcgaatgaagcagaagggactcaggattgccagaggcatcttctaaggacgtctcccaggggctggctggctggctggggactaagcacttacagactagagtggcccaggccacaggtacctctgccctcctgccagcccaggctactcccagactccactttcaccccgaacctgtcctgctgccgggattgacacctgccactgacaggctgacctggcctccggggaccgctcaccgccttaggtgccttctgctctctgcaaccagaggactagctgactttgccaaggggtgctgccagctgggcatggagcctcgcctgccctggacaatgtccaccacactttcctgtcacctccccaagtgcagatcactgccacccatgctcccagatgctccaggacacccacacacccagcggggctgccaactgcgttctctccttgtgcccataggccatggcctgggaccttcatggaggtcctagcctttcttaggctgcaccaaagattccaccttcaggcctacagagtgagggagtctcgcccaccacgagcccaagccctcccatggatcagagagagaagccctctcatggaccgcctggttggcattgaaccccataccactgaaagtgccattcaccaccgctgcgtcccgggtgtacaagactacatgcaatgggaggtttgtggggagggggaagacgactggatatttgtataaaacgtaaaaagtttactgattggggtggggcaatatttatttgttgtaaatagaaaatgctagacttgaatattatattaaaatcccgtttc

SEQ ID NO: 324 - DNA, 4213 bp, Rattus norvegicus
aatattggtttgttaaggcagtttctgtagaggtttctaagagaccagtcgcgcagtccgcgctgctgtcctttccgccttttccgcgcgggtgttcgagcagcgccaaacacgcttcagcacctcggacagcatccgccgcgctcgcccggggctcctagagaacccgggggcgcttgaccgcgcgcgggcggcccgcgggtcgtacatcgcgaggtcgtcgcactcgcgcaacccagagccaggcccgctgtgcccggagctcatgagcaccatgcacctgctgacattcgccctgcttttttcctgctccttcgcccgcgccgcctgcgaccccaagatcgtcaacatcggcgcggtgctgagcacgcgcaagcatgaacagatgttccgcgaggcagtaaaccaggccaataagcgacacggctcttggaagatacagctcaacgccacttctgtcacccacaagcccaacgccatacagatggccctgtcagtgtgtgaggacctcatctctagccaggtctacgctatcctagttagccacccgcctactcccaacgaccacttcactcccacccctgtctcctacacagctggcttctacagaatccctgtcctgggactgactacccgaatgtccatctactctgacaagagtatccacctgagtttccttcgcacggtgccgccctactcccaccagtccagcgtctggtttgagatgatgcgagtctacaactggaaccacatcatcctgctggtcagcgacgaccacgagggacgggcagcgcagaagcgcttggagacgttgctggaggaacgggagtccaaggcagagaaggtgctgcagtttgacccaggaaccaagaatgtgacggctctgctgatggaggcccgggaactggaggcccgggtcatcatcctttctgcaagcgaggacgacgctgccacagtgtaccgcgcagccgcaatgctgaacatgacgggctctgggtacgtgtggctggtcggggaacgcgagatctctgggaacgccctgcgctacgctcctgatggcatcatcggacttcagctcatcaatggcaagaatgagtcagcccacatcagtgacgccgtgggcgtggtggcacaggcagttcacgaactcctagagaaggagaatatcactgacccaccgcggggttgcgtgggcaacaccaacatctggaagacaggaccattgttcaagagggtgctgatgtcttctaagtatgcggacggagtgactggccgtgtggaattcaatgaggatggggaccggaagtttgccaactatagtatcatgaacctgcagaaccgcaagctggtgcaagtgggcatctacaatggtacccatgtcatcccaaatgacaggaagatcatctggccaggaggagagacagagaaacctcgaggataccagatgtccaccagactaaagatagtgacaatccaccaagagcccttcgtgtacgtcaagcccacaatgagtgatgggacatgcaaagaggagttcacagtcaatggtgacccagtgaagaaggtgatctgtacggggcctaatgacacgtccccaggcagcccacgccacacagtgccccagtgctgctatggcttctgcatagacctgctcatcaagctggcgcggaccatgaattttacctatgaggtgcacctggtggcagatggcaagtttggcacacaggagcgggtaaacaacagcaacaaaaaggagtggaacggaatgatgggcgagctactcagtggccaagcggacatgattgtggcaccactgaccatcaacaatgagcgtgcgcagtacatagagttctccaagcccttcaagtaccagggcctgaccattttggtcaagaaggagattcccaggagcacactggactcatttatgcagccttttcagagcacactgtggttgctagtaggactgtcagttcatgtggtggctgtgatgctgtacctgctggaccgcttcagtccctttggccgattcaaggtgaacagtgaggaggaggaggaagatgcactgaccctgtcctctgccatgtggttttcctggggcgtcctgctcaactccggcattggggaaggtgccccccggagtttctctgcacgtatcctaggcatggtgtgggctggtttcgccatgatcatagtggcttcctacactgccaacttggcagctttcctggtgctggatcggcctgaggagcgcatcacgggcatcaatgaccccaggctcagaaacccctcagacaagttcatctacgcaactgtaaagcagagctccgtggacatctacttccggaggcaggtggagttgagtaccatgtaccggcacatggaaaaacacaattacgagagcgcagctgaggccatccaggctgtgcgggacaacaagctgcacgcctttatctgggactcggccgtgctggagtttgaggcttcacagaagtgcgatctggtgaccacgggtgagctgttcttccgctcaggctttggcatcggcatgcgcaaggacagcccctggaagcagaacgtttccctgtccatactcaagtcccatgagaatggcttcatggaagatctggataagacatgggttcggtatcaggaatgcgactcccgcagcaatgctcctgcaaccctcacttttgagaacatggcaggggtcttcatgctggtggctggaggcatcgtagctgggattttcctcattttcattgagatcgcctacaagcgacacaaggatgcccgtaggaagcagatgcagctggcttttgcagccgtgaacgtgtggaggaagaacctgcaggatagaaagagtggtagagcagagcccgaccctaaaaagaaagccacatttagggctatcacctccaccctggcctccagcttcaagagacgtaggtcctccaaagacacgagcaccgggggtggacgcggcgctttgcaaaaccaaaaagacacagtgctgccgcgacgcgctattgagagggaggagggccagctgcagctgtgttcccgtcatagggagagctgagacgccccgcccgccctcctctgcccctcccccgcagacagacgcacgggacagcggcctggcccacgcagagccccggagcacgacggggtcgggggaggagcactcccagcctcccccaggccgtgcccgcctgcccaccggtcggccggctggccggtccaccctgtcccggccccgcgcgtgcccccgacgtcggagctaacgggccgccttgtctgtgtatttctattttacagcagtaccatcccactgatatcacgggcccgctcaacctctcagatccctcggtcagcaccgtggtgtgaggccccccggaggcgcccacctgcccagttagcccggccaaggacactgatgagtcctgctgctcgggaaggcctgagggaagcccacccgccccagagactgcccaccctgggcctcccgtccgcctgctctgctgcctggcgggcagcccctgcaggaccaaggtgcggaccagagcggctgaggatgggccagagctgagccggctgggcagggccacagggcgctccggcagaggcagggccctgaggtctctgagcagtggggtgaggggcctaagtggccccggtcggaggagtctggagcagaaatggcagccccatccttcctccagccactaccccaagctacagtgggggcctatggccccagcttgctaggtcacccccgacccttcctccagcgcctgctctctgcaacttgatttccacctctctcctgctgcaccaccctcccacgacatttccccaccccattcactgggttgtctctgacctttcccagggctagccttcactgccctagtggcagtgcttcaggggtgctttctggctcccagacatctagggctccagactccaagagggctgagccttctcttctgtccgcagccacaataggcttcctcagacgctggctcgtgatgagtcccgcaccttgggcaccagggagcgccatctgcctcccagtccggtgtcactcaccccactaccttgtacatgaccagctctcccagtgtcccagtgtctgccccagggacaccgggcgcgcacagccacccctaatcccggtattcagtggtgatgcctaaaggaatgtcag

SEQ ID NO: 325 - DNA, 1362 bp, Rattus norvegicus
atgctgttgcttctcccctggctcttcagtttactatggatagaaaatgcccaagctcaacttgaagatgaagggaacttctattctgaaaatgtcagtcggattcttgacaacttgctggagggctatgacaaccgtctacggccgggatttggaggtgctgtaacagaggtcaaaacagatatctatgtgaccagctttgggcctgtgtcagatgtggagatggagtacacaatggatgttttcttccgacagacatggactgatgagaggctgaagttcaaaggccctgctgagattttgagtttaaataacttgatggtcagtaagatctggactccggacacatttttccgaaatgggaaaaagtcaattgctcacaacatgaccacccctaacaaactcttccgattgatgcataatggaacgatcctgtacaccatgaggcttaccatcaacgctgactgtccgatgagactggttaacttccctatggatggacacgcatgtccactcaagtttgggagctatgcctatccgaaaagcgaaatcatatatacatggaaaaaaggaccgctttattcagtagaggtcccagaagaatcttcaagcctcctccagtatgatttgattgggcaaacagtttctagtgagactattaaatcgaacacaggtgaatatgtaataatgacagtctacttccacttacaaaggaagatgggctatttcatgatccagatttacactccgtgcatcatgacagtcattctctctcaagtgtctttctggattaataaggagtcggtcccagcaagaaccgtctttggaatcaccacggttttaaccatgaccaccttaagcatcagtgctcggcactctctacccaaagtgtcctatgcaaccgccatggattggttcatagctgtatgctttgcgtttgtcttttctgctctcattgaattcgcagctgtcaactacttcaccaatctccagtcccagaaagccgaaaggcaggcacagactgcagccaagcccccggtagcaaagtcaaaaacaactgaatcactggaagctgagattgttgtgcactctgactccaagtaccatctgaagaagagaatcagctctctgactttgccaatcgttccatcttctgaggccagcaaagtcctcagtagaacgcccatcttaccatcaacgccggtcactcccccattgctcttaccagccattggcggcaccagcaaaatagatcaatattctcgaattctcttcccagtagcatttgcaggattcaaccttgtgtactggatagtttacctttccaaagatacaatggaagtgagcagtactgtcgagtag

SEQ ID NO: 326 - DNA, 1799 bp, Rattus norvegicus
gaattccctggggctagccggacctgtcccgcgcacagcccgcaaggccatggacgttctgggctggctgctgctgccgctccttctgctgtgcacgcagccgcaccatggcgccagagcaatgaatgacattggggactacgtgggctccaacctggagatatcctggctccccaacctggatggactaatggagggctacgcccgaaacttccgaccaggcattggaggtcctccagtgaatgtggcgcttgccctagaggtggccagcattgaccacatctcagaagcaaatatggaatacaccatgacagtgttcctgcaccagagctggcgagacagcaggctgtcctacaaccataccaacgagaccctgggcctggatagccgcttcgtggacaagctgtggctccctgacaccttcattgtgaatgccaagtctgcctggttccatgatgtgaccgtggaaaacaagcttatccgcctacagcccgacggtgtgattttatacagcatccgcatcacctccacagtggcctgtgacatggaccttgccaagtaccccatggacgagcaggagtgcatgctggacctggagagctatggctactcttctgaggacattgtctattattggtcagaaaaccaggagcagatccacgggctggacaggctgcaactggcccagttcactatcaccagttaccgcttcaccacggagctgatgaacttcaaatcagctggccagttccctcgactcagcttacacttccagcttcggaggaaccggggtgtctacatcatccagtcttacatgccctctgtcctcctggttgccatgtcctgggtctccttctggattagccaagcagcagtgcctgccagagtatctctaggcatcaccactgtgctgacaatgaccacactcatggttagtgcccgctcctccctcccgcgggcttctgctatcaaggctctggatgtgtatttctggatctgctatgtcttcgtgtttgctgccctggtggagtatgcatttgcccacttcaatgctgactacaggaagaaacggaaagccaaggtcaaggtcacgaagccaagggcagagatggacgtgaggaacgccattgtcctcttctccctctctgctgctggggtcagccaggagttggctatctcccgccgtcaaggccgggtccctgggaacctcatgggttcctataggtctgtagaagtggaggcaaagaaggagggggggtcccgcccaggaggcccaggaggcatccgttccagactcaaacccatcgatgcagacaccatcgacatctatgcccgcgctgtgttcccggcagcctttgcagcagtcaacatcatctactgggcggcgtataccatgtgacggcagtgcgtacaccacatgacggctttacatgtaccacgtgcggtggttgccacaaactcctggaggaacagccctctccgtggatcccaaagtgggacagagaggagcgtccgctccctgggctttacctcaattttgctctaccagcctgcacttcctgtagatggagcaggatgggctttgcacagagggccattagttggcctgtccctgaagctgagcctgcactaaggtgcccttgggagctgtgaagttttagactcaggatgggcctgatttctgggcctttgctctgtgggatcaggatcagagagaaagagagtaggggtggatgaccactctcatggtgaactggaggagaagggcattatgaggcctctttggtcccagggaattc

SEQ ID NO: 327 - DNA, 1232 bp, Rattus norvegicus
gggggtgagcccggcccgtgtggcagcggttcctcttggtgattgtatcgcgccctctttgctgctaattaccgcgttctccattctcaccatgctgtctctagactttctagatgatgtacggcggatgaacaagaggcagctgtactaccaagtcctaaattttggaatgattgtctcctcggcactaatgatctggaaggggctgatggtgataaccggaagtgagagtcccattgtagtggtgctcagtggcagcatggagcctgcgtttcacagaggggatctccttttcctcacgaaccgagttgaagatcctatacgtgtgggggaaatcgttgttttcaggatagaaggaagagagattcccatagtgcatcgagtcttgaagatccatgaaaagcaagatgggcatatcaagtttttaaccaaaggagataataatgccgttgatgaccgaggcctctataaacaaggacaacactggctggagaagaaagatgttgtagggagagcaagagggtttgttccgtacattggaatcgtgacgatcctcatgaatgactatcctaaatttaagtatgcagtactgtttctgctgggtttatttgtgctggtccatcgtgagtaagaagccggcctcgctggtcctgggaggatgctgtcttgttgttactgaatgttggagtagaccctggcctgtgactggcgggtatccggaggacacatatggcggcacttctgggtagcactgctttgcattactttgtgtttccacacccgaggatgtgtgggcgggtgcatgtgcaccatggcgtgcacacaaggggactgtcaatcacaggctttcatatgttgtcattgtcactctttcacatttttgtacatcagtgaattttttatattaaaaggttgagccaaagcccccagtgtttgtattttgaagccaagcttcacttttaaagtgcctacagagctctgtgcatgcaaacacagctctgcatgagttcaaacctgtcgttcctccttaacgtgggaagggcacataatgaggcggtcataagtcttaacttttcaaaattttaaataaaagactttgcacattgaaaaaaaaaaaaaaaaaaaaaaaaaaaaaaaaaaaaaaaaaaaaaaaaaaaaaaaaaaaaaaaaaaaaaaaaaaaaaaaaaaaaaaaaaaaaaaaaaaaaaaaaaaaaaaaaaaaaaaaaaaaaaa

SEQ ID NO: 328 - DNA, 1842 bp, Rattus norvegicus
cgccagagccgcagcttctctcgccccgcagcccgtcgccaccatggtgaagatcgtgacagtgaagacgcaggcatatccggatcagaagccgggcaccagcgggttgcggaagcgagtgaaggtgttccagggcaacgctaactatgcggagaatttcatccaaagcatcgtctccaccgtggagccggcgttgaggcaggaggctaccctggttgtgggcggggacggtcgcttctacatgaccgaggccatccagctcatcgtacgcatcgccgcagccaacgggattggccgcctggttattggacagaatggaatcctctccactcctgctgtatcctgcattatccgaaaaatcaaagccattggtgggatcattctgacagctagccacaatccaggagggcccaatggagattttggaattaaattcaatatttctaatgggggtcctgctccagaagcaatcactgataaaattttccaaatcagcaagacaatcgaagaatatgccatttgccctgacttgaaggtagacctcggtgttctggggaagcagcagtttgacttggaaaacaagttcaagcccttcacagtggagatcgtggactcagtcgaggcctatgccacaatgctgagaaacatctttgatttcaacgcactgaaggagctactctctggcccaaacagactgaagatccgcatcgacgccatgcacggagttgtgggaccgtacgtcaagaagatcctctgtgaagaacttggtgcccccgcaaactcagctgtgaactgtgttcccctggaggattttggaggccaccaccctgaccccaacctcacctacgctgctgacctggtggaaaccatgaagtcaggagagcatgatttcggggctgcctttgatggtgatggggataggaacatgattctgggcaagcacgggttctttgtgaacccttctgactctgtggctgtcattgcagccaacatcttcagcattccgtatttccagcagactggggtccgcggcttcgcacgcagcatgcccaccagtggtgctctggaccgggtagcaaacgccacaaagatcgcttcgtatgagaccccaactggctggaagttttttgggaatttgatggatgcaagcaagctttccctctgtggagaggagagctttgggactggttcagaccacatccgagagaaagatggactgtgggctgtcctggcctggctctccattctggccacccgcaaacagagggtggaggacattctcaaagaccactggcagaagtttggtcggaacttcttcaccaggtatgactacgaggaggtggaagccgagggggcaaacaaaatgatgaaggacctggaggccctgatgctggaccgctcctttgtggggaagcagttctcagcaaacgataaagtctacacggtggagaaagctgataacttcgaatatagtgacccagtagatggaagcatttcaaaaaatcagggcttgcggcttatttttgcagatggttctcgtatcatcttcagactgagcggcaccgggagtgctggggctaccatccggctctatattgatagctacgagaaggacgctgccaagatcaaccaggacccccaggtcatgctggcacccctgatctccattgctctgaaagtgtcccagctccaggagaggacaggccgcactgccccaactgtcatcacctagagagatggctggatgtggcacatcctccccaggaactgtccacactgcctgattgaagagcacagacagaacagtgtattcgacctggcctttagactcatcttatttta

SEQ ID NO: 329 - DNA, 2171 bp, Rattus norvegicus
ccttgccgctcgctgctagcttggatccgcgtggactacagggactgaatcggacccggaaccacatggccccactcgccggtgcctctcgctcccgggtgtggtcagcggggctactgaggctgctgctgctgtcctgctttacgctccagaaagcgggtggggagatagctgtgcaggtgctctccaattcgaccggcttcttgggagggtctacagtcttgcactgtagtctggcttccaaagacaatgtgacaatcactcagctaacatggatgaagagggatccagatggatcccacccttccgtgcctgtcttccaccccaagaaggggcccagcatctctgatccagagagggtgaagttcttggttgccaaggtgtacgaggatctgaggaacgcatctctggccatctcgaacttgcgtgtagaagacgaaggcatctatgagtgtcagattgccacgttccccacaggcagtaagagcgccaatgtctggctgaaggtgttcgcccgacctaaaaacacagcagaggccctggagccctctcccaccttgatgccgcaggacgtggccaaatgcatctctgctgatggtcaccctcctggacgaatcacgtggtcctcgaatgtgaatggaagctaccgtgaaatgaaggaaacagggtcccagccgggcaccaccacagttatcagctacctctccatggtgccttctagccaggcagatggcacgaacatcacctgcacagtggaacatgaaagcttccaggagccggaccagcagccattgatcctttccctaccttatccacccgaagtgtccatctctggctatgaaggcaactggtacattggcctcactaacgtgaacctgacctgtgaagctcgcagcaaaccaccgcccaccaactatagctggagcacggccacgggtccccttcccaactccactcatttccaggaaaacggcagtcacctgctaatctccaccgtggatgacctcaataacacgatctttgtgtgcaaagccatcaatgccctagggtctgggcagggccaagtgaccatcctagttaaagaggcatctgagattctgccgccaaagacaagcttaggcactggctacatcattgccatcgtcttttgtgtcctgatcatcggagtagtagcaggcattgtattctggaaatacaggcgtggttgtggtcggcagtccaggaccttagacagggagaacgtccgctattcagcagcgaatggcgtctctgtcccaaacgtggagacgaacaacttgaggtgatggtgctggggtagacagaactaaggaacttgaagacataacaactggaaccctacttccacaaaagaaaaagcctccagagagacttgactgtccagtgtggcgaacatagcaaggttgggggtctccttggccgctgccgaattccgcattgtcgaaaggactcatggaacccggtgtgctgactcacacttgacatctcagcaagcgagggccacataaagcaaggttgagtctagcacggctgtagagagaagccctgtctatacacaggcaagctaaggggctttgagacagtcagaaactgaagtctttctttgggtaaggtaaatcctctacctcgtgtatgtgacaaacttgaaagacttctacctctgagactcaagtgcggactctctttatagctgactcagctggggctaacccctctctcctctctggacaaggtctcagagtgtagccaaagctagaccgaaactcacagaggtccgtctgtctctacctcccaagtgctgcagttaaaggtttgtgtgtgccacactcctttgctaggtctttttaataaagtaaatatttaataaagtaatatatttataaaaaaactagttataatatatattttttgagacagtgtttcctgtagcccaggctgacctcaaacttactatgtagccaagaatgatagtaaactaatttattttaatttgtcttcaagcttaaacatagcccaacccctgctcctttccctctcttctctcaatccattttcgtcttctttttcttcccagacactattctgatgtatgtcttcattgcaaacattttattgaccttcgtaaaaatgtgtgaaccacagataaaaaaaag

SEQ ID NO: 330 - DNA, 1608 bp, Rattus norvegicus
gacagccgaacacttaacgccgcgccggagccaccgcaccagtcgccgagcaggtcccggtcccgctacgtcgtgtcccgcggctctgccgacactccggcctgagagacgggtcttcagccttttctcttccgcccactcagttgtgagccggaaccgtgaaggcccgagggcggaccagaccctctctttttttgaccatcaagtgccaccaccgctatgggcctcaccatctcctctctcttctcgcgcctcttcggcaagaagcagatgcgcattttgatggttggattggatgctgcgggcaagacgacgattctgtataaactgaaactaggggagatagtcaccaccattcctaccattggttttaatgtggaaacagtagaatataagaacatttgtttcacagtttgggatgttggtggtcaagataaaattaggcctctctggaggcattacttccagaatacccagggtctcattttcgtggtagatagcaatgatcgtgaaagaattcaggaaggagcagccgtgctgcagaaaatgcttctggaagatgagctgcaggatgctgtgctgctgctttttgccaacaaacaggatttgccaaatgctatggccatcagtgagatgacagacaagttaggtcttcagtctctccggaacagaacatggtatgtccaagccacttgtgctacacaaggaactggtctgtacgaggggctggattggctgtcaaatgaactttcaaaacgctaaatgaaactggatatctaaccaaggacatgtttgatagaattggtctaggcttgttacaacaaaattagtttgcatcttggttattaaaggatatctgagacggtttgggcagaaattacagcatttaaaacttgttttgttgccaattattgtttaccaagaacaatgttgctgtttagcaatatgcttgggtttaagagaaattctccttgggggaaaaaagtgtccattattatacttcccctgaacctgaatgcctggatagatagcgattgtgacacccttaaataaatctgttttgagtgttttttgagcccacaccaataatgttttaaagttacccccttggaactcactgatacctatcattcctcgggcagtctgctgagttaaaaatgtagcattccatttgtatttatttcccccttgccaaaaagatttttctaataatgcttgtactggccagggatgagctccacaacactattcagttttcttgtactgaggattcccccacctccctcacattattgactcctggcttctatcagccaaactttgatgtagtttggatttgatagctaattctgggctggtttcaaagagttcatattgagataacttttaatactcagcaaattgtcttcctttatattatcttttttatgttgcatgttgccttttggaatcagcctgactctttgcccagcatatgatagttctgctggtattttactgtttactgatgaacatatcttcattaagaattttttgaaaactcatcaaattcaatgaataagttttcttcataacccatttggaattattcctaataaaatgattttt

SEQ ID NO: 331 - DNA, 1395 bp, Rattus norvegicus
aggctctctgcaataggtgcccggcccagcttttttttcaaaatgtctactgtccacgaaatcctgtgcaagctcagcttggagggtgatcattctacacccccaagtgcctatgggtcggtcaaaccctacaccaacttcgacgctgagagggatgctttgaacattgaaacagcaatcaagaccaaaggcgtggacgaggtcaccattgtcaacattctgactaaccgcagcaatgcacagaggcaggacattgccttcgcctaccagaggaggaccaaaaaggaactgccatcggcgatgaagtcggccttgtctggtcacctggagaccgtgatgttaggcctgttgaagacacctgctcagtacgatgcctctgagctcaaagcctccatgaagggcctggggactgatgaggactccctcatcgagatcatctgctcaagaaccaaccaggagctgcaggagattaaccgagtgtataaggaaatgtacaagaccgatctggagaaggacatcatctctgacacatctggagaattccgaaagctgttggtcgcccttgcaaagggtaaacgggcagaggatggttctgttattgactacgagctgattgaccaggatgcccgggagctctatgatgctggggtgaagaggaaaggaaccgatgtccccaagtggatcagcatcatgactgagcgcagtgtgtgccacctccagaaagtgttcgaaaggtacaagagctacagtccttatgacatgctggagagcatcaggaaagaggtcaaaggagacctggagaacgccttcctgaacctggttcagtgcattcagaacaagcccctgtactttgctgaccggctgtatgactccatgaagggcaaggggactcgagacaaggtcctgattagaatcatggtctctcgcagtgaagtggacatgttgaaaatcagatctgaattcaagaggaaatatggcaaatccctgtactacttcatccagcaagacactaagggtgactaccagaaggcgctgctgtacctgtgtggtggggacgactgaagggcttggcatggtggattgcccagaagtggccctacctgtgccccaacctaatgttctagagaatcagcctgccactaatggacccctgaactcctccctgtgaagatgacgacagagctgccgacccatcccccatcttagctgcctttgcctggctttcccctcattctctcctttatgccaaagaaatgaacattccagggagttggacgtaccgtctgtgacatgagacacttcctcatatgtgtcgtgaataaaccatttttactttaaaaaaaaaaaaaaaaaaaaaaaaaaaaaaaaaaaaaaaaaaaaaaaaaaaaaaaaaaa

SEQ ID NO: 332 - DNA, 5637 bp, Rattus norvegicus
ttcgggagcgctcgcccggcgggaggaggaggaagaaggatcgcggctcgggctggtctggccacctcgccccgcgcgccccgcccctgcgcgcactccctcgccggcgagctactttcggacaaggaaagtgagggcggccccgggtgacagcgcggcggtgccagtcccgggaagccgcgtctgttcgcgtgtcgcccgtcgcactgtccagaccccgccatggcttcgaccaccacctgcacccggttcaccgacgagtatcagctcttcgaggagctcggaaagggggcattctcagtggtgagaagatgcatgaaaatccctactggacaagagtatgctgccaaaattatcaacaccaaaaagctttctgctagggatcatcagaaactggaaagggaagctagaatctgccgtctcttgaagcaccccaatattgtgagacttcatgacagcatatccgaagagggcttccattacttggtgtttgacttagttactggtggcgaactctttgaagacatagtggcaagagaatattacagtgaggctgatgccagtcattgtatacaacagattctagagagtgtaaatcattgtcacctaaatggcatagttcacagggacctgaagcctgagaatttgcttttagctagcaaatccaaaggagcagctgtgaaactggcagacttcggcttagccatagaagttcaaggcgaccagcaggcgtggtttggttttgctggcacacctgggtatctttctccagaagtcctacgtaaagatccttatggaaaaccagtggacatgtgggcatgtggcgtcatcctctacatcttgctggtgggatacccacccttctgggatgaagatcagcatagactgtatcagcagatcaaggctggagcgtacgattttccatcaccagaatgggacacagtgacacctgaagccaaagacctcatcaacaaaatgctgaccatcaaccctgccaaacgcatcacagcctctgaggccctgaaacacccatggatctgtcaacgttctactgttgcctccatgatgcacaggcaggagactgtagactgcttgaagaaatttaatgctcgacggaaattgaagggtgccatcttgacaactatgctggctacgagaaatttttcagcagccaagagtttgttgaagaaaccggatggggtaaagataaacaacaaagccaacgtggtaaccagccccaaagaaaatattcctaccccggcgctggagccccaaactactgtaatccacaaccctgatggaaacaaggagtcaactgagagctcaaataccaccattgaggatgaagacgtgaaagcacgaaagcaagagatcatcaaagtcactgagcagctgattgaagctatcaacaatggggacttcgaggcttacacgaaaatctgtgatccaggcctcactgcctttgaacccgaagcattgggcaacttagtggaagggatggactttcacagattctactttgaaaatgctttgcccaaaatcaataaaccaatccacactatcatcctgaaccctcacgtacacctggtaggggatgatgcagcctgcatagcatacattcggctcacacagtacatggatggaaatggaatgccaaagacaatgcagtcagaagagactcgagtgtggcaccgccgtgatgggaagtggcagaatattcactttcatcgttcggggtccccaacagtccccatcaagccaccctgtattccaaatgggaaagaaaacttctcaggaggcacctctttgtggcaaaacatctgaaaaccattcacatttgggtcttctaattgtcaacagtgccacgtcttcattctgtcctcaaggcacctggcggggtgatcctgggacatcctctcctcttcatgcatgtttctgagtgcatgaagttgtgaaggttctacgtgtaatgcatatgtgacacgtcatcttaccatgtgacacgccatcttaccatgtattccttcctgtacattgtttacactccagctactggacggatgttccatgcaaacgtcagttactgctggcaaactaaagagggagctccgacaagaaaactccgcaatactccaagttcagctgatccatcaggtttctctgtggatgccaagattcaaaagacttcataaaattactgttcaatgaatgacagtgtgtaagaggaaaggaaatctttcaagaatgctgccattaatctatttgggcttctcattgggattttggggttgattttttttttcattttttaaggcaaatatatatatatatatatatgccttcagttcctggtgtgatcctggtagaaatgaatggatgccttttctctgaaagtgttggtgttggataaatggatggctatgtgagccaagtcctgggtgattgtaggagcaagaatcgtttgctgttctaccatcaaagccatgttgatttgggtcgagctctgtatactggaaaaattcacatcattttctagtttgattgctttcagataggcacagttctggtgaatgcttggcactgatcttggtttttctttcctaaatctgtgttctgttttcattatatactatttgctcctttcctttgtatttgttttcttttcccactcttttctttatctttctctctcccactttctttcttttttatgttttcctttctatagctgatagtgtgtaaaaacagtaacatttgcatatgaagttaaaataaaaatcaaggtcttctagaagctaaaactagcacttccggtctctcacggggctgtggagttgttagaagatttaaataaatacttaaataagagaggaatgaattcagcttaggttaccacttgtgcataggtatccttgctctgttgaaagtgttggaattgttgagacttaagctaacagcagtaagagcctgcttacacagtcctggttctccccaactagatattgaagaccaagtggagcctgaccagggttgcatgcagagcacttgttttggaccttccagactaggaggcatttactgcctcactttcactagctagccacaggaagagtgttctccatcctcctagaggttgaacttgaccttcgtgactagtgcagttctagcttctctcttgagtcacagtagcatcctgatgccaggagttaggcttttgtccagattaaaacaacgaggaaaaggaaatgccccagttttctttccgtttcccatttcttctttgtcgattcggtccctgggagactgtttctccgcgctgaactgctttatggtgcatggaatctccatcagcgtacttccaccctagccactcacactccttagaagctgatttttaaagcagaagcaaggaagcaaaagtaaaacactcccttcccctctttttcctcatttcaccttttggtgttgattgctaatcactttagatatattgttgctagtgaatgtatgatagatgggttgaagcttttctgataattagcacatgatttaaaacaatatatatttaaaacaaatatatacagtacatgtattgagccgtgttaacctgccaatgagatctgtgaaaaacgtaatggcctcacttttccctttgaatttcttttacctttctgtgaagcagctctgcgtggcatacatgtatttaaaaacacaaatagtggtagaatgggtttttttttacacttttaacttagcatgtggtgttgaagtattaccatagatccagtttgtcttctgcactaagatgtgaggaaatcgtgatttgttctctccagcacagtggaattacaccttcatcatcttctattgttttgaaaacactgcagtttaccatgggacactgtatataattcttgccgtaatggtaaatgacgaattgatatatttaagagttaataaatttgtgatttctgctgacagcgtgtccttctttatttctcaaataccctatgtgtggtgccggccacagccgaggacattatgtcctgccctggtctccttcaatagacatcttgcagtctgtgatcatggcaagcaatttgttctctctgcacataacagtgctgtcttttcacaaaaaaaaaaaaaattagctaaaaggaaagtagttagcagctgactatcctaaaagattttagacatgctgcttctgtccatctcttacaggactgctaaaatgtcccactcactcctaatacaaatctgtcagtcatctccagtatctagcagtcaccctagctgctatgaccccagaactacagattgctaaggtgtccatgagttaaagcaccacctactatttcttatatccattcatgtgacttactttcttacctagaacggtcttcctttgttggattaaaccaatctttgactcattcactggggtccaaagtagtgttgcacctcctccagcgaatttcctctgcagcttctaggttttatttgctctgtcatgacttgcatggtagtctgtattctctgttcctgatgctatccacattattttgacaatatatttttgtattatctttactgtagtaggaaagtctgtagagataagaactgcacattcatggttgtacccttaccaccaaaccagaacaagaaagaggctgttaataaactgctttttaaaattttttattagatatatttctttacttacatttcaaatgttattccccttcctagtttcctgtccataagcccccattccctcccttcccctccccatgcaggtattccccctatacatcctccgtatttcccccccattcccctgccctaggggtccaaccttggcaaaaccaagggcttccccttccactggtgccccaacaaggctattctctgctacatatgtggttagagccctgggtcagtccatgtataatcttttggtagtgaataaactggttttgaaccatattgtccaaggcaacctctaggtgagatcacacagtcctgagttgaatgttgggctctgtcatcattattttgatgttctaaataagtcatttcccttgaacttcactttccaagattataaaatgagtataagtatgtaaattaaattataatatcctaaggattagaaaaacaggcataaaatccctggaataccatttttggtattaagtggacatcattgggcatgttggtatatggctatgatctcggcaggctaatgtgaactagatagaagaccccatctcaacaaatgcataaataaactcctgctactcatggagccctactattcttgtatcgttccctgtttaagatcaggagggtgtgcaacctttgctttaccaggggttgctctcttcattgcaaaggatgtattgcattccactgtctcagcaagaagttgggagccagaaggaggtggccgtgtccctgaaaatgcaaaagaagatggagtacattctggggaaattttcaaaaatgtcaagtttgagtagctaaaactttgaatttctatgtaaatcaaagaattctatataatgtgaggataaatgtagaagacacaacctttgagtcatttcattaaataaaatcttactgactttg

SEQ ID NO: 333 - DNA, 2410 bp, Rattus norvegicus
tacgctgctttggtggcgtgcacctctcacggtgtgcctagccgccgatgcccaggctgcacgatcacgtctggagctacccaagcgcgggcgctgcgaggccgtacagcctcccgcgaggcatgattgcggcggccctctgtccgcagggccccggagcccccgagcccgagcccgcgccccggggccagcgagagggaaccgcaggcttcagcgcacgacccggcagctggcaccacgacctggtgcagcggagcctcgtgctcttctcatttggcgtggtcctggctctggtgctcaacctgctgcagatccagcggaatgtcacgctcttcccggacgaggtgatagccaccatcttctcctccgcctggtgggtgcccccgtgctgtggcacggcagccgctgttgtcggcttattgtatccctgtattgacagtcacctgggagaaccacacaagttcaagagagagtgggccagtgtcatgcgatgtatcgcggtgtttgttggcatcaaccatgccagtgccaaattagatttcgccaataatgtgcagctgtccctgactctggcagccctatccttgggcttgtggtggacgtttgatcgatcccgaagtggcctggggctcgggatcaccatcgccttcctagccacgctgatcactcagtttcttgtttataatggcgtctaccagtacacgtccccagatttcctctatatccgttcttggctcccttgtatatttttctcaggaggtgtcacagtgggaaacataggacgacagttagctatgggtgttccagaaaagcctcacagtgactgagtttgagcacatgattcagggcggaagcagaatgtggagacactggtcctgggtgtggtgaagaggatctttttctcaatgttccatttagactgggctgatgataaatgactcctaaagatgcgttcacgtagtctaaatagcaagtggaggcaaggactacttacctaaagtcttaccttgctcacccaccctcacacctgtctgcactggaacattctatcccaggctgtatgtgagagttgggtaagggggccggtttcccgagtattagatttcactcatcattcaaagcaaaatgccatatttcaaagccttgaatcaaaatgaattaccaactagcagttttatatcagtgcccaaaggagagaggttgatggtgcttaacagagatgaagtatgtgcagtaagaatatttatccagaattaaaatatagggttgtgtaaagaggggctaagggcagcagtaagttggaggaagatcatgctccccggaggacccagtgcagccacatctccaggtctcgctcaggctggcgctcacacgtgggtctcatcagtgtgggaactatgctgtttactgacaggaggcttgtagacaatcttactgacagcccaggacaacacaaagtcaggattctgcattgcgatgctggacttttcatctcaatttaagtgaagttttatccaagatctggagcatctaagagtgaatagctgtctgctgtttcagtcgtaatgagccgaaattgtgtctctgtcactccagagtggagaggacttttccacagccctatggagcttgcaatctgtgattgccttgtaaaaggttgagtgtgcacgtcactgcgttcggtgcgcagtgtcctgtgtgtgttggacagcgtagaacacatgggaccttgcaagtattgggtcttcaacttcaagtgcaatgtgtatgaaaccaatctgagccttgtattctcttaaatatttattatttttttttaaccgcgcgagctgttctggagaagggttctcgggtcatttcagagctgtgtgaggcacactcagcaatactgtgtcagccgtgacgctccccagtcacaccctccactacaccctagtcctttgacatactccaggtttgtaagtttagtgatttttacttacaaatttacccttttttgcattctaaaattgtgtttaaattatatggaagtacttggtgtaggcagtcattggtccccgggcagcagaagctctgcctgtggaatcgggtttgggttcactctgcagggctcctcatagaggctttgcttatttgttttgaggaaaatgtctggagtaaacctttgttttctgaaactactttagctaaaagaaaatgggtgttctagactttggaatggttcttaaagtttcctggaaataaaaataatgattggcacttcaaagacattctttagccaagacttcagtgtctagcagaaaccacaagtgactagaagagcaagtgatcttggtgatgcacttgattgtatacaatgagtattttttctcttaaactggaaataaatctgttagaaataatatagcca

SEQ ID NO: 334 - DNA, 3269 bp, Rattus norvegicus
ggcaacgaaggtaccatggatcttatacaagaagtgaaccaacatgccgcaacctccttggaagccacaagcgatgaggctctccttgttcgccctcttggtaactgtcttctcaggggtctccacacaaagccccatatttggtccccaggatgtgagtagtattgaaggtaactcggtctccatcacgtgctactacccagacacctctgtcaaccggcacacccggaaatactggtgccgacaaggagccaacggctactgcgcaaccctcatctcttcaaatggctacctctcgaaggagtattcaggcagagccagcctcatcaacttcccagagaatagcacatttgtgattaacattgcacatctcacccaggaggacactgggagctacaagtgtggtctgggtaccactaaccgaggcctgtttttcgatgtcagcctggaggtcagccaggttcctgagttcccaaatgacacccatgtctacacaaaggacataggcagaactgtgaccatcgaatgccgtttcaaagaggggaatgctcatagcaagaaatccctgtgtaagaagagaggagaggcctgcgaagttgtcatcgactctactgagtacgtggaccccagctataaggacagagcaatcctttttatgaaagggaccagccgcgatatattctatgtcaacattagccacctaatacccagtgatgctggactgtatgtttgccaagctggagaaggccccagtgctgataaaaataatgctgacctccaggtgctagagcctgagccagagctgctttataaagacctgaggtcctcagtgacttttgaatgtgacctgggccgtgaagtggcaaatgatgccaaatatctgtgtcggaagaacaaggaaacctgtgatgtcatcatcaacaccctggggaagagagatccagcctttgaaggcaggatcctgctaacccccagggatgacaatggccgcttcagtgtgttgatcacaggcctgaggaaggaggatgcagggcactaccagtgtggagcgcacagttctggtttgcctcaagaaggctggcccgtccaggcttggcaactctttgtcaatgaagagtccacgattcccaatagtcgctctgttgtgaagggtgtcacaggaggctctgtggccatcgtctgtccctataaccccaaggaaagcagcagcctcaagtactggtgtcactgggaagccgacgagaatggacgctgcccggtgctcgtggggacccaggccctggtgcaagaaggatatgaaggccgactggcactgttcgatcagccgggcagtggcgcctacactgtcatcctcaaccagctcaccacccaggattctggcttctactggtgtcttaccgatggtgactctcgctggagaaccacgatagaactgcaggttgctgaagctacaaagaagccagaccttgaggtgacaccacagaacgcgaccgcggtgataggagagaccttcacaatctcctgccactatccgtgcaaattctactcccaggagaaatactggtgcaagtggagcaacgacggctgccacatcctgccgagccatgatgaaggtgcccgccagtcctctgtgagctgtgaccagagcagccagatcgtctccatgaccctgaacccggtcaaaaaggaagatgaaggctggtactggtgtggggtaaaagaaggtcaggtctatggagaaactacagccatctatgtagcagttgaagagaggaccagagggtcaccccacatcaacccgacagatgcaaacgcacgtgcaaaagatgctccagaggaagaggcaatggaatcctctgtcagggaggatgaaaacaaggccaatctggaccccaggctttttgcagacgaaagagagatacagaatgcgggagaccaagctcaggagaacagagcatctgggaatgctggcagtgctggtggacaaagcgggagctccaaagtcctattctccaccctggtgcccctgggtttggtgctggcagtgggtgctgtggctgtgtgggtggccagagtccgacatcggaagaatgtagaccgcatgtcaatcagcagctacaggacagacattagcatgggagacttcaggaactccagggatttgggaggcaatgacaacatgggcgccactccagacacacaagaaacagtcctcgaaggaaaagatgaaatagagactaccaccgagtgtaccaccgagccagaggaatccaagaaagcaaaaaggtcatccaaggaggaagctgacatggcctactcagcattcctgtttcagtccagcacaatagctgcgcaggtccatgatggtccccaggaagcctaggcagtgctgaccacctacccctgcctgtgacaatcaacttgagaatcacattgatccactcgcagcccaccctcgcccatcacccaggctcttccctcctgttctcagaggtgtgctggttcctccctcagtcgtggaagcctggcctacttatgcctgtttaggagagagcgtgaggagttctttttgctgttaaagagtaaggtggaaatgagttgagcccaagaggtgtctctgagagacgagggttcagagcaggggctcatttcaggaggaagagccatttgaagcctctttatacacatatgctaggatgtcaggatagctcttctcctccatctctcctttcttctcttcttgattcagacaacagatccgaaaactcactaggcttccggtgtctactaaatgctgagagtcaggccacagcctttctataaacatcactggaagagacaccacctcgtcccagattctgtcttttccctaagctatcaatcattaccggggattccctttgcctctgcacctcataggcaacaaaagaaacataagtcctgcagtctaaggcatacccaagccataagggcaccacgagactcagatgagaagagatttttctccagagtactcagtgagatagactagtgtcaagccagatggggcaactcctggctcttggcctgggacttgtcttcaagatctctgctcttattagagaaagaactttagcatgaggaaaagtaagagaaaacaagttacatgggcatggtggtgtgctcctgcaatcccaatattaagaggttaaaaaataggaccagaagtttaaagtaatccttggctacctagtgagtgtaaggccagcctggaatcaataagagttggt

SEQ ID NO: 335 - DNA, 1356 bp, Rattus norvegicus
cccggagctgtcgatcggggacaaagcgcggccgcccgcgccccccgagccgcccgagccggggccagccccccgcgactgacatgatgtttccgcaaagccggcactcgggctcctcccacctcccccagcagctcaagttcaccacctccgactcctgcgaccgcatcaaggatgagttccagctgctacaagcgcagtaccacagcctgaagctggagtgtgacaagctggccagcgagaagtcagagatgcaaaggcattacgtcatgtactatgagatgtcttacggattgaacatcgagatgcacaaacaggctgaaattgtgaagaggctgaatgggatttgcgcccaggttctaccctatttgtcccaggagcatcagcagcaggtcctgggagctatcgagagagccaagcaggtcacggctcccgagctgaactccatcatccgacagcagctccaggctcaccagctgtcccagctccaggcgctggccctgcccctgacaccgctgcctgtcgggctccagccgccatccctccctgcggtcagcgcaggcacaggcctgctgtcactctctgctctgggctctcagacccacctctccaaggaggacaagaacggacacgatggggacacccaccaggaggatgatggagagaagtccgattagctcctggggagagggagggggaggggggataccaggggagacaggcacagagagcacagtgttctgagggccacactgcacacagctcggtccctacccaagcttccacctccagtcctggttccagctgtgcaccctgggcctaggagacgccagagggacagcccaggctacagggaaaattccccaccttcaacatttccccgggctacagccaccaatctcggcccagaatgtacacaacgctagccgcccctttccaccctgtgcaccccgaatttgccccctttccccttctctgcttcctgcactgcacacctgctaggcccagacccctccccccagctcacccagctctggttccctcaaccgcggaaagaaagcattggctcgggactgcagtgggggtgggcaccccacaaacttccctctccccttccccaaataaacgtgagggttaaaagtcggtttgtttattatttctttttcgtcccagtactctatagctaccatctaagagagaaaaagaaggaagccctggagcgagcgagggtctgtctgtgcatatagttagatttttctggtcgcctcgctttgcaccgagaggtggagggccgctgtactgagggtggggtctagctgtgccttcaaaataaaaacatgaaaaggtcaaaaaaaa

SEQ ID NO: 336 - DNA, 2458 bp, Rattus norvegicus
atgcggccctcccagacagcgctgtggctgggtctggttttgtctttggccctcctggctgtggggtgggcctcagcccgaccacccatctatgtcagcagctgggcagtgcgggtgaccaaaggttaccaggaggctgagcgcctggcacgtaaatttggcttcgtcaacctgggacagatctttcctgatgaccagtatttccatctgaggcaccggggtgtggcccagcagtccctgactccgcactggggccaccgtctgcgcctgaagaaagagcccaaggtgcggtggtttgagcagcagactttgaggcggcgggtgaagcgctccctggtggtacccacagacccctggttttccaagcagtggtacatgaacaaggagatagaacaagatctcaacatcctaaaggtttggaaccagggactgactggccggggagtggtggtctccatcttggatgatggcattgagaaggaccatccggacctctgggctaattatgaccccctggccagctatgacttcaatgattacgacccagatccccagcctcgatacacacccaacgatgagaaccggcatggaacacgctgcgctggggaggtgtctgccacagcaaacaacggtttctgtggtgccggtgtggccttcaatgccagaattggaggcgtgcgcatgttggatggagccatcactgacatcgtggaggctcagtccctcagcctgcagccgcaacacatacacatctatagcgccagttggggccccgaggatgatgggcgcacagtggacggacccggcctcctcacgcaggaggccttcaggcgtggtgtaaccaagggccgccaagggctgggcacgctgttcatctgggcctcgggaaacggtggcctccactacgacaactgcaattgtgacggctacaccaacagcatccacacgctgtcagtgggcagtaccacgcggcagggccgagtgccctggtacagcgaggcctgcgcctccacgttcaccaccaccttcagcagcggtgtggtcaccgacccacagatcgtcaccacggacctacaccatcaatgcaccgacaagcacacgggcacctcggcctccgccccgctggccgctggcatgatcgccctggcgctggaggccaacccgctgctgacctggagggacctgcagcacctggtggtccgcgcgtccaggccggcgcagctgcaggcggaggactggaggatcaacggcgtggggcgccaagtgagccaccactatggctatgggctgctggacgcggggctgctggtagacctggctcgcgtgtggctccctactaagcctcagaagaaatgcaccattcgggtggtgcacaccccaacccccatcctgcctcggatgctggtgccaaagaacgtgactgtatgctgcgatggctcgcgccgccgcctcatccgctcgctagagcatgttcaggtccagctgtcgctctcctacagccgccgcggggacctggagatcttcctcaccagccccatgggcacgcgctccacgcttgtggccatcagacccttggatatcagcggccaaggctacaacaactggatcttcatgtctactcactactgggatgaggacccgcagggcctgtggaccctggggctggagaataagggctactattataacacaggaactctgtactactgcacgctgctgctgtatgggacggcagaggacatgacagcgcggccccagaccccccaggtgaccagctgcgcgcacgcatgtgcagagggacacagaggggctgtgccaggaaagtcattgtcccctctccattgtggcagaactctgcctcatctccagcaagcagtggtggtggctctacagccacacacagcagccagtgaccaagggacaggacagctgtcaccctcctaccacacctgctcggcagcttgaccagcgactacactgcctgttccctgcccctcatgctgggagtgcttcagagcccctccaaggcttgtcacctctggcagccatcctggctatcagtcttgggccatggtgctgtccctgctaaccagggcctttggaaggcccctcatcttgaggaaggcccacctctccccaggctggatacccctggggagccagagatgccccactctcaggacagaaggccggtaccccaaggccctgctcccaggccgggataggaatatgccccagaaggccacggcagagagctgcatgggtcacgtgacagcccgcagctcagcctcagctgctcccagtggaagagacgtttcctcattctttttggagcaggtatggcagacaagaggtcagaccacagccaccaaccacctgccccttccctgtctccaaaccatccccatgtctaacctcatagttggcaaataaagttaaacagaaaaaaaaaaaaaaa

SEQ ID NO: 337 - DNA, 3438 bp, Rattus norvegicus
caccgagccgggcctgggagcctcccggccaacgttctgcagctggtagcctgctgcaggctgggcactgtcccccgagcagtgtgcccttaagtactggctaagcgtcctaccacccgggcccgcagctgcttcccaggcgggccctcaggtatcccgtcgcgtgcctacgtttgaaccgaagtccaccgtggagttccgccgccccgaaacttccaccgcgagcgagaaatatgggatgtattaaatcaaaaaggaaagacaatctgaatgacgatggagtagatatgaagactcaaccagtacgtaatactgaccgaactatttatgtgagagatccaacgtccaataaacagcaaaggccagttcctgaatctcaacttttaccaggacagagatttcaagcaaaagatccagaggagcaaggggacattgtggtggccttgtatccctatgatggcatccacccagacgacttgtctttcaagaaaggagaaaagatgaaagttctggaagagcacggggagtggtggaaagctaagtccctttcatcaaagagagaaggcttcatccccagcaactacgtggccaaggtcaacaccttagaaaccgaagagtggttcttcaaggacataacaaggaaagatgcagaacgacagcttctggcaccagggaacagtgccggggctttcctgatcagagaaagtgaaactttaaagggaagcttctctctttccgtcagagattacgaccctatgcatggcgacgtcattaagcactacaaaatcagaagcctggacaatggtggttattacatctctccgaggatcacttttccctgtatcagtgacatgattaagcattaccaaaagcagtctgatggtctatgcagaagactggagaaggcatgcatcagtcccaaaccacagaagccatgggataaagatgcttgggagatcccccgggagtccattaagctggtgaaaaaactcggcgcagggcagttcggggaagtctggatgggttactataacaacagcacaaaagtggctgtaaagaccctcaagcctggcaccatgtctgctcaagcattcctggaagaggccaacctcatgaagaccttgcagcatgacaagctagtgcggctgtatgctgtggtcaccaaggaggagcccatctacatcattaccgagttcatggccaagggtagcttgctggatttcctcaagagtgacgaaggcagcaaggttctgctcccgaaactcattgacttttcagctcagattgcagaaggcatggcgtacatcgagcggaagaactacatccaccgcgatctgcgagctgccaacgtgctggtctctgagtctctcatgtgcaagattgcagactttggcctcgcgagagtaatcgaagataatgaatacacagcgagggaaggtgccaagttccctatcaagtggacggctccagaggccatcaacttcggctgcttcactatcaagtctgacgtgtggtccttcggaattctcctgtacgagatcgtcacctatgggaagattccctacccagggagaactaacgcagatgtgatgaccgcactgtcacaggggtaccgaatgccacgcatggagaactgtccagatgagctctatgacatcatgaaaatgtgctggaaggaatcagcagaggagaggccaacctttgactacttacagagtgtactggatgacttctacactgccacggaagggcagtatcagcagcagccatagtgggcatggagaccagcccactggagctcataggaaaagcagccgtgggagaataccaggaccctctgtgttcctggttctgtggacaggatgcattaactcaggaagaacatcctggacagaggatgctgtttcatacatgggtggccactgctcagtgggaccacggtcagaatacaaacaccccctctcccaataagcacactggctctacgtgggccgagtgactcaggttcagagacttgcaacaaattcccagatgcaacaagaactaaactcacttagcgaaagtaaaccccgtgcacagcagatgctcccttaccttctcagtgctttggcttactttcttaaaaactactaatccagcctgttgaattttacaggcgaaggccacgagctttaaaacatcttctctaaattcgaatgttttttttttttttttgggcttgggaaatttgattcctcctcacctcccacctcaccccccagaaaatgagacgattaaacattttcctttgcggtaagatcactggacctaaggcagcactcactccccctgcaggagcgctgtgcgtgggtgggcacgcaggaaggacctttgctgaactggagccctttggacagaaaaagcctcaagttctgccctgtagaggaatgtttgtaatggtccaggtatttcagtcacaggtttctctcaaggctttcctgatggtgtcctttgggagaaacgtaagcgtctctcctagtctgtcaggactttatgagaccctccaaaaatacaaagcatttctctcattgcctcaaatgacttgaacattttataaatcatatagtatagtcgtactctaaggaagttaaaatgccatgttgggggctatttttgtgactcagtaatcttttctaaattgtgtgggagactatttacacgtgaaggtaggaagcaggcaatcatggagaagcctctggtgaccagagcagtttcgttacctgggtttttcccctgtaaactcccattagaaactgctgtgtctgtccctttcactggtgttactgtgtacatacctaatatttctatttttgattttattttaatacacccaataacatcttgaggtctttgtctcgtgtatcagattccaactcctgtccgtgcataagtaagagccggttggtggggaaagggcagggagtcattctgtgcagtcacattgcgggagcttgtggagtcttgcgcctccaacgctggcgtgtttccggttggacgctggggtgtttccggttggagggctgaggagttgatgcctggatgcccaaggaacaggctttgcaggcacctttactgttgtaatctgtgtgtttatttgaagctctgggtgcctaggggaagggattggaatgtctcgtgtttgtccaactttaatgtgtgttttccctgatttttttaaaatagtatcctttcaaagtattctaaagcccttcattcccaagtgccctgtttacaaacatggcatgtgcgtctttggttacctgatttacaatagcggttttctgaggcccttcccaccccgcactctccacacactcatttcggactcccctgcattgtctacttcatgggaaggaagagtgaagaatccttaaagttaaagaaatcgctaaaaaaaaa

SEQ ID NO: 338 - DNA, 2301 bp, Rattus norvegicus
ccccgtgtccctcgcgcaggcgggcggccccggagacatagtgcccgcaaaggcggtgacggcggtgcgcccactcatcatgagcacaagctttgcccgaaaaagccacacattcctgcccaagatcttcttcagaaaaatgtcatcctcaggagctaaggacaagccagagctgcagttccctttccttcaagatgaggacacggtggctacgctgcacgagtgcaagacgctgttcatcctgcgtggcctgccgggcagcggcaagtccactctggctcggctcatcgtggagaagtaccacaacggcaccaagatggtgtctgctgatgcttacaagatcattcctggctctcgggcagacttctccgaggagtacaagcgtctggacgaggacctggctggctactgccgccgggacatcagggttcttgtgctcgatgacaccaaccatgagcgggaacggctggaccagctttttgaaatggcagaccagtaccagtaccaggtggtgctggtggagcccaagacggcgtggcgactagactgtgcccagctcaaggagaagaaccaatggcagctgtcgctcgatgacctgaagaagctgaagcccgggctggagaaggacttcctgccactttactttggctggttcctgaccaaaaagagttccgagaccctccgaaaagccggccaggtctttctggaggagctgggaaatcacaaggctttcaagaaagagcttcgacacttcatttctggggatgaacccaaggagaagcttgacctggtcagctactttggcaagagacctccaggcgtgctgcactgtacaaccaaattctgtgactacgggaaggccaccggggcagaagaatatgcccaacaggatgtggtgaggagatcttacggcaaggccttcaaactgtccatctctgccctctttgtgacacccaagacagctggggcccaggtggtgcttaatgagcaggagctgcagttgtggccaagtgacctggacaagccctcatcctccgagagcctgcccccagggagccgagctcacgtcaccctaggctgtgcagccgacgtgcagccagtgcagacaggccttgacctcttagagattttacagcaggtgaaggggggcagccaaggtgaggaggtgggtgagctcccccggggcaagctctattccttgggcaaagggcgttggatgctgagcttggcgaagaagatggaagtcaaggccatcttcacggggtactatgggaagggcaaacctgtacccgtacacggcagccggaaggggggtgccatgcagatctgcaccatcatctgagggttcacgccactgtgccaccgctgtggacacagcaacatgccttccacttgatttttaagattttttttttttactcaaagctaatctacctataactttttagaagtctgtaaaataaccatcagttccttcacccaccctcttccccttaacactcagctcaacacaggcaggtgggcagaggaagacaccattcaggaacctggaccagaggtggtaattaaagggctgggtcattggcctggagcggccacctagatgcacccaggaccttgttaaccctcccttagccgctgcccatgcagagctgggcacacacacctcagagccaccacacatcatgcaagggacaaatgctactgccacaggaaaacagtggtagctttgagaggggacagacccctgggtgccaatcttaatcactgtagccccaaggaaggcttgggctacttactgggctgtaaaaggggcttacctctcaccgttggtcattcccaactccctctctccttcactggcactaggttaatggtgtgaccactaggggagaaaatggcattaccggaagccacatctctggttccggtctggctatctagccttaacagctgtctctgctaaggtcagagagatgctttaagaaactccagctttgctttctgcccagcccatcttgcctccgtggtgcctctgggcctcctctaaaggatggtggtgggtaccaagagccaacggagggggccctgagccagcaagagtaagccccatctgctctggggaagtctgaacacgcgcgtgtgctgtggttcctggagtacctcactctgctcagtaacaggaccttgctaattgggttgtcacccaagcatctgggatttatgttcctaccctcaccctgtgttgcccacctcagcaacaactaagactgatactgaaataaatcgtgttaatcccaa

SEQ ID NO: 339 - DNA, 1697 bp, Rattus norvegicus
ggcagtgctgctgctgctggatcctttgcagagaccagaacccccctttccaagcttgtatcattgtggactagggaccagctaggttccagaaatcttccttccacgattccagctcctggttgggactactgatacaccacaccctgtggctgagcatctccagggtcaccgtgcattaaccccactcccactgtgatctgcttcctgtgttgaccatgcctgggtggagctgcctggtgactggagcaggagggtttttgggccagaggatcgtccagttgttggtgcaggagaaagatctgaaggaggtcagggtcctggacaaggtcttcagaccagaaaccagagaagaattcttcaacctagggacaagcatcaaggtgacagtgttggaaggagacattcttgacacccagtgcctgaggagagcgtgccagggcatctctgttgtcatccacactgccgccctcattgatgtcacaggtgtcaatcccaggcagaccatcctagatgtcaatctgaaaggtacccagaatctgttggaggcctgtgtccaagctagtgtgccagccttcatctactgcagcacagttgacgttgcagggcccaactcctacaagaagatcatcctgaatggccatgaggaagagcatcatgaaagcacatggtcaaatccatacccatacagcaaaaagatggccgagaaggcagtgctggcagccaatgggagcatcctgaaaaatggtggcacattgcatacttgtgccttaaggcccatgtacatttatggggagagaagtccattcctttctgtcatgatacttgcggccctcaaaagtaagggtattctgaatgttactggcaaattctccatagccaatccagtgtatgtaggcaatgtggcctgggcacatattctggctgccaggggccttcgagaccccaagaagtcacaaaatgtccaaggacagttctactacatctcagatgacacccctcaccaaagctatgatgatttaaattataccctgagcaaggaatggggcctccaccttgattccagttggagccttcctctgcccctgctctactggcttgccttcctgctggaaattgtgagcttctttctgcatccagtgtacaactataggccatcctttaaccgccacttggtcacactgtcaaatagcaagttcactttctcctacaagaaagctcagagagatctgggctataagccacttgtcagctgggaggaagccaagcagaaaacctcggagtggatcgggacactagtggagcagcacagggagacattggacacaaagtctcagtaatgggaagagggcagggacatggtcctgggtgtttactggatcctccagcaaggacagacatataagccaggtcatgctgccttctttcaacacagaatccagtttagtgccttcaagtcatcagaagaagccttgccagccactgacccagccatgagctgtctttctgaaatacctgcccagagatacacagcttcctaagcaccttttgtacctcagagctctctccattcttttctctccccatccaaagcatgtctaaccttcagaaaagtctgcttgctttgtgaagcccaatagaaggaacaataaatatttgtcaacacttaaaaaaaaaaaaaaaaaaaaaaaaaaaaa

SEQ ID NO: 340 - DNA, 1776 bp, Rattus norvegicus
atggaagggaagtggttactgtgtttgctactggtccttggaactgcagctattcaggctcatgatggacatgatgatgacatgattgatattgaagatgatcttgatgatgttatcgaagaggtagaagattcaaaatctaaatcagataccagcactcctccatctccaaaggtcacctacaaagctccagttccaacaggggaggtttattttgctgactcctttgacagagggtctctgtcagggtggattttatctaaagccaaaaaagacgacactgatgatgaaattgccaaatatgacggaaagtgggaggtagatgaaatgaaggaaacaaagcttccaggtgataaaggacttgtattgatgtctcgggccaagcatcatgccatctctgctaaactgaacaagcccttcctgtttgataccaagcctctcattgttcagtatgaggttaactttcagaatggaatagaatgcggtggtgcctacgtgaagctgctatccaagacctcagaactcaacctggatcaattccacgacaagactccgtatactattatgtttggtccagataaatgtggagaggactacaaactgcatttcatctttcgccacaaaaaccccaagacaggcgtatatgaagaaaaacatgctaagaggccagatgcagatctgaagacctatttcactgacaagaaaacacatctttacacattaatcttgaatccagacaatagttttgaaatattagttgaccagtctgttgtgaacagtggaaacctgctaaatgacatgacccctccggtaaacccttcacgtgaaattgaggacccagaagaccggaagcctgaagattgggatgaaaggcccaaaatagcagatccagatgctgtcaagccagatgactgggatgaagatgccccttctaagattccagatgaagaggccacaaagcctgaaggctggttagatgatgaacccgagtatattccagaccctgatgcagagaaaccagaagattgggatgaggatatggacggagaatgggaggctcctcagattgccaaccctaagtgtgagtccgcccctgggtgtggtgtctggcagcgacctatgattgacaaccccaattataagggcaaatggaagcctcctatgattgacaatcctaactaccagggaatctggaaaccaaggaaaataccaaatccagatttctttgaagacctggaaccttttaggatgactcctttcagcgctattggtttggagctctggtccatgacatccgacatcttttttgacaactttatcattagtggtgaccgaagagtagttgatgactgggccaatgatgggtggggcctgaagaaagctgctgatggggctgcagagccaggtgtagtggggcagatgctggaggcagctgaagagcgtccatggctttgggtggtctacattctgactgtagcgttgccagtgttccttgtgatcctcttctgctgttctggaaagaaacagtccaatgctatggagtacaagaagacagatgctccccagccagatgtgaaggacgaagaagggaaggaagaagagaagaacaagggagatgaagaggaagaagaggagaagcttgaagagaaacagaagagtgatgctgaagaagatggtggcactggcagtcaagatgaggaagatagcaagcctaaagcagaggaggatgaaattttgaacagatcaccaagaaacagaaagccacgaagagagtga

SEQ ID NO: 341 - DNA, 714 bp, Rattus norvegicus
cagattcttttcagtcctctgaagactgcacacaggatggctgcaaacaagcccaagggtcagaattctttggccttacacaaagtcatcatggtgggcagtggtggtgtgggcaagtctgctctgactctgcagttcatgtatgatgagtttgtagaagactatgaacctaccaaagcagacagctacaggaagaaggtagtgctggatggggaggaagtgcagatcgacatcttagatacagcagggcaggaagactacgctgcaattagagacaactacttccgaagtggggaaggattcctctgtgtcttctctatcacagagatggagtcctttgcagctacagcggacttcagggaacagattttaagagtaaaagaagatgagaatgtcccatttctcctggttggtaacaaatcagatttagaagataaaaggcaggtttctgtagaagaggcaaaaaacagagctgaccagtggaacgttaactatgtggagacgtctgctaaaacgcgcgccaacgttgacaaggtattttttgatttaatgagggaaatacgagccagaaagatggaagacagcaaagaaaaaaatggaaaaaagaagaggaaaagtttagccaagagaatcagagaaagatgctgcattttataatcaaagcccaaactcctttcttatcctgacctgaccatactaataaatataatttat

SEQ ID NO: 342 - DNA, 2607 bp, Rattus norvegicus
gatcattggcgggctccagcttcgggtcccgccccctgtcccgctccccggctcccattgtctccgcagatgcctcctagtccagctaccgtgctggggctgttcagttttgggggggacgctcgtattcttttcttcgagacgtcccgcggccgagaacaggattttagagttccgtggactcttttttcctccttaggactcactttgccccgtcccaggaaggagagcagctatgtccgcggtgcgacctctcctgcttttgctgctccctctgtgtcccggtccaggaccgggacatgggagtgaagcaaaggtcgtccggagttgtgcagagactcggcaggtgctgggggcccggggatatagcttaaaccttatccctccctccctcatctcaggtgagcaccttcagatctgtcctcaggagtacacctgctgttccagtgagacagagcagaagttgatccgggatgctgaggtcaccttccgtggcctggtggaagacagtggctccttcctgattcacacgctggctgcccgccacagaaagtttaacgagttttttcgggagatgctgtctatatcccagcattctttggcccagctcttctcgcattcctatggtcgcctgtattcccagcatgccgtcatcttcaatagcctgttctccggcctgcgggactactatgagaagtctggtgaggggttagatgacaccttggcagacttctgggcccagctcctggagagagccttccctttgctgcacccacaatacagtttccctcctgatttcctgctctgccttactcggctcacttcaactgctgatggctctctccagcccttcggggactcgccccgccgcctccgcctacagataacccgggcactggtggcagcccgggccttggtccagggtctggagaccggaagaaatgtggtcagcgaagcacttaaggtacccatgttggaaggctgcagacaggccctcatgcgtctgatcggctgcccactttgtcggggagtaccctcgcttatgccctgccggggcttctgcctcaatgtggcccacggctgtctcagcagcaggggattggagcctgaatggggcggatatctggatggtctcctgctgctggctgagaaactccagggacccttttccttcgagctggctgctgagtccataggggtgaagatctcagaaggtttgatgcacttgcaggaaaacagtgtaaaggtgtcagccaaggtgtttcaggaatgtgggacgcctcacccggtgcaatcccgtaaccggcgagcaccagcaccccgggaagagactagccggtcttggaggtcgtcagctgaggaagaacgccccacaacagcggcaggcactaatctgcaccgtctggtttgggagctccgagagaggcttagccgagtgcggggcttctgggctggacttcccgttacggtgtgtggggactcccgcatggcggcagatctctcccaggaggcggcaccctgctggactggggttgggagaggccggtatatgtcgcctgtggtcgtgggctccttgaacgagcagctccataacccggagttggatacttcgagtcccgatgtcccgacacgtcggcggaggctccatctccgagcagctactgctcgaatgaaggcggctgcgctgggccaggaccttgacatgcatgatgcggatgaagacgccagtggctccggagggggacagcagtacgcagacgactggaaagctggggcagcgcctgtggttcccccagccaggcctccaaggccacctcgtcctcctcgaagggatggtcttggagtgagaggaggaagtggcagtgccagatacaaccagggccgaagcaggaatctggggtcctctgttggcctccatgccccacgtgtcttcattctcctcccctcagccctgaccctgcttggacttcgataacaagcgaggggcgccctagcgtcaggaggcttagtggccttttccttccacctccctcagctgggcatgaggaagaatggaagggggctaccgggagggcagaaagggactttgtaggtaaatggctggggccccaaatccaggagtttcctattagtgggttgggaggggaggtagatgggtgttcataatatttattttttcatttgggaactggggatatttatttaggaagggattgtggttcagctcttttaaggcttgggtctcattgatgcaaaaggcagggggtggggttgggatcgggttgaaggaacttggaagtggggaggggtggcactattggcatgggggtacctgatattgaaaatgaacaaataaactagctgagagtgatgtcacttgcctgtaaaccattattttggaggctgaggcaggaggattgagcgttggagacccataaaattaggtgctgatagtggaacaggcggggtgggaggtaggacctgagttttattgacttttaaaatcatctgtttcttaaatatgggggaacccatcttgtgacctttgctgtctaatgtttcagtgttcacatcggtgtttattggtaaataaacaatttgaccatg

SEQ ID NO: 343 - DNA, 645 bp, Rattus norvegicus
atgaactttctgctctcttgggtgcactggaccctggctttactgctgtacctccaccatgccaagtggtcccaggctgcacccacgacagaaggggagcagaaagcccatgaagtggtgaagttcatggacgtctaccagcgcagctattgccgtccaattgagaccctggtggacatcttccaggagtaccccgatgagatagagtatatcttcaagccgtcctgtgtgcccctaatgcggtgtgcgggctgctgcaatgatgaagccctggagtgcgtgcccacgtcggagagcaacgtcactatgcagatcatgcggatcaaacctcaccaaagccagcacataggagagatgagcttcctgcagcatagcagatgtgaatgcagaccaaagaaagatagaacaaagccagaaaaaaaatcagttcgaggaaagggaaagggtcaaaaacgaaagcgcaagaaatcccggtttaaatcctggagcgttcactgtgagccttgttcagagcggagaaagcatttgtttgtccaagatccgcagacgtgtaaatgttcctgcaaaaacacagactcgcgttgcaaggcgaggcagcttgagttaaacgaacgtacttgcagatgtgacaagccaaggcggtga

SEQ ID NO: 344 - DNA, 1844 bp, Rattus norvegicus
cgacttgggaggacctgttgctcttcactgacctcgatcaggccgcgaccgccagcaagctgctgtggtccagccggggcgccaagctgagtcccttcgcggccgagcagccggaggaaatgtaccagacgctcgccgctctgtccagccaggggcccgccgcttacgacggcgctcccggcggcttcgtacactccgcagctgcggcggccgcggcggccgcggcagccagctctccggtctacgtgcccaccacacgcgtgggctccatgctgcccggcctgccttacctgcagggggcgggcagcgggcccagcaatcacgcgggcggcgcgggcgcccacccgggctggccccaggcctccgccgacagccccccgtatggcgggggtggtgcagcgggcggcggcgcggccggacccggaggtgcgggatcagccacagcccacgcctctgcacgcttcccctactcgcccagcccgcccatggccaacggcgccgcgcgggaccccgggggctacgtggctgcgggcggcgcgggcgcgggtagcgtgagtggcggtggcggcagcctggcggccatgggtggccgggagcaccagtacagctcgctgtccgcagccaggccgctgaacgggacgtaccaccaccaccatcatcaccacccgacctactcgccctacatgggcgctcctctgactcccgcctggccagcgggacccttcgaaacgccggtgctccacagtttacagagccgcgcgggagctccactcccggtgccacgaggccccagcgcagacctgttggaggacctgtcggagagccgcgagtgcgtgaactgtggctccatccagacgccactgtggagacgagatggcaccggtcattacctgtgcaacgcatgcggtctctacagtaagatgaacggcctcagcaggcccctcatcaagccacagaagcgcgtgccttcatcacgacggcttggactgtcctgtgccaactgtcacaccacaaccactaccttatggcgtagaaacgctgagggtgagcccgtgtgcaatgcttgcgggctttatatgaaactccatggggtgcctcgaccacttgctatgaaaaaagaaggaattcaaaccaggaaacgaaaacctaaaaatataaataagtcgaaagcttgctccggtaacagctctgttcctatgactccaacttcctcctcctctaattcagatgactgcaccaaaaatacttctcctcccacacagtcgactgcctcaggggtgggtgcatcagtgatgtctgcagtgggagaaagtgccaaccctgagaacagtgacctcaagtattcaggtcaagatggcctctacataggtgtcagtttgtcctcccctgccgaagttacatcctcggtgcgacaggattcttggtgtgctctggccctggcctgagctggtgctgccaagggctctgaaggcctcataccacttgtgtctgattttgtccagcagtccagatggcggcaaaaaatgcagacataacattccttcgatgcgtgatttctgtgcctttgttttgaaagagatatatttcccaagaagcttattgaagtaagaagagatgggtctttgtaggaaggggcagcacagtgggcgtgtggcctattcctgtcagcctgggtctgcttccagccagcttgcctctggctctgctccacaccagtgggagaaactgtgacaatgactggggccttgtctgctaaggaagattgagagattaaaaaaaaaatagtttgtgtattgctccaaatcatgtgcttcttgtgatcaaccttggttatcccagaattc

SEQ ID NO: 345 - DNA, 3313 bp, Rattus norvegicus
cccgaggctccgctgttgctgcagctccgcggactcacggagatcgcgccggctctctgggaaactggagctggccaggactgtcgcttcgaagggaacgggccctcttcgtccttcgctggagccgcactggagccaccaaatgcgcctgggtgtgcagcaggcagaaagcaaggactaggcacctctagcccgtgggtgatccgaaggcctgcgcagggtgttcgagaccagtcttgactgagttctgggcatctccagcctctgggccctggagtagagtcagccctcctgcagtttctggagcaaccacaaatccaatttgggatttttgttttcttcttgagcaaaccagagcctaaagattgttgctctgatgctggatttaattcgtatatattttgagcgagttgggcctgtcctcattgttttttgatctccgttttcgcgacagttctgcacacctgtattccaattcttgtcgctttggtctgccgcgcccgcgtgggctccttgacttgcaaataaaggggagcacaccgaagctcagagcttggggcgatgtaccaaagcctggctatggccgccaaccacgggcccccgccgggcgcctacgaagcgggtggacctggcgccttcatgcacagtgcgggcgccgcgtcctcgcccgtctacgtgcccactccgcgggtgccgtcctctgtgctgggcctgtcctacctgcagggcggaggcagtggtgctgcttctggagccacctcgggtggcagctccggggccggcccgtcgggtgctgggcctgggacccagcagggtagcccgggctggagccaggctggagctgagggagccgcttacaccccaccgcctgtgtccccgcgcttctccttcccggggactactgggtccctggcggccgccgccgccgctgccgcagcccgggaagctgcagcctacagcagtagcggcggggcagccggcgctggcctggctggccgagagcagtacgggcgtccgggcttcgcaggctcctactccagcccctacccagcctacatggccgatgtgggcgcatcctgggccgcagccgctgccgcctccgccggccccttcgacagcccagtcctgcacagcctacctggccgggccaaccctgcgagacaccccaatctcgatatgtttgatgacttctcagaaggcagagagtgtgtcaactgcggggccatgtccaccccactctggaggcgagatgggacaggacactacctatgcaacgcctgtggcctctaccacaagatgaatggtatcaaccggcccctcatcaagcctcagcgccggctgtctgcctcccgccgggtaggcctctcctgtgccaactgccagactaccaccaccacactgtggcgccgtaacgctgagggcgagcctgtttgcaatgcctgcggcctctacatgaagctccatggggttcccaggcctcttgcaatgcggaaggaggggattcaaaccagaaaacggaagcccaagaatctgaataaatctaagacaccagcaggtcctcctggcgagagcctccctccctccagtggtgcctccagcaactccagcaacgccaccagcagcagcagcagcagtgaagagatgcgccccatcaagacagagcccgggctgtcatctcactatgggcacagcagctccatgtcccagacattcagtactgtgtccggccatgggtcctccatccatccagtgctgtcggctctgaagctctccccacaaggctatccatctcctgtcactcagacatcacaggccagctccaagcaggactcttggaacagcctggtcctggctgacagtcatggggacataatcaccgcgtaatcagcacccccttccctcttcaaattcctgctcggacttgggacctggggccagcaaagtaaaaggctggggcaccctggccagcccctctgtgtgggaacaactcctgaagaacaactggtagaacttgaagttgttgacaatcacttagggataagggtgctgggtttcttcaaatacctttccaggtggagcactggaagaagcctgcattctcacagaaaagcccaccttggctgcaagcacagcacagtgaggctcttcagtgagcaggagacttcttcctccttctctacctgcctgtccaggacagacacataatcttcaccccagctccccaccccagtggctgtggtgatgggtttttctttgtgatcctagagtggctgtagggaccgaggcttcaagacactgtctacagccggcgcagggtgtctacttgtggactagacatagcagccctgcccttgtccaacactccccttgaggcatggaacatctcatgtgtcccatacctgatctgactccaaagcgctgggtgcagtgcagatgttactgagtgcttcctggggggtttaggtgaggagaaggcacatcacccatcacacagatcgcagcccgtcagaggtgccttcccttcctctcccaggaacagcaacccccttgctctccagcctgaacatctcctaccctctgtaaaactagagcccagttgtacagcaggctaataccactaggtgctgttcccagcatccatttccacctcttcacacacaggggttccaaggaggaacaaaacctgctactaaagcagggttggtgactgtgctcatctgcaccttgggaccctctggaggttgtgtctacagcacaatcctgcccccaggactccagcttacttgctctgagcctgccaagccaagctctctcaagtcagacagttaactggctctgggactttctccagcacagatcctttgtctagaaaatacggactgtttgcaaaacaaattcagagcagaaacaacaaagggaaatttttgaaaggacaagggtgatggatggaagaagatgtccccaggcctgatgggacagccatgcttgcagttgtgctagaactggcaacccctctccctcctccattactggggctcccaaagattcttccttgtcttcatcacccacagagctgtagccaactgtggcattaccttgttttgccccaaatttccagccccgcccctaaaccttactggccgtagcagagaatagctttgaaccaagattctgttgtaatcatttacgctgtttctccctcaaggccgccttcctatgcctccccctcctccacaacccgttaacattgtcttaaggtgaaatggctgtaaaatcagtatttaactaataaatttatctgtattactcttaa

SEQ ID NO: 346 - DNA, 2221 bp, Rattus norvegicus
ggagattttccacaagaaaaggttgttttcatgtttgggatccaggaaagcatccaacggagtggaagcagtatgaaggaagagccgctgggcagcggcatgaacgcggtgcggacgtggatgcagggcgccggggtgctggacgccaacacagcggcgcagagcggggtgggtctggcccgggctcactttgagaagcagccgccttctaacctgcggaaatccaacttcttccacttcgtcctggccctctacgacagacagggccagcccgtggagattgagaggacggcctttgtggggttcgtggagaaggaaaaagaagccaacagcgaaaagaccaataatgggatccactaccggctccagctcctctacagcaatgggataaggaccgaacaggatttctacgtgcgcctcatcgactccatgacaaaacaagccatagtgtatgaaggccaagacaagaacccggaaatgtgccgagtactgctcacacacgagatcatgtgcagccgctgttgtgacaagaaaagctgtggcaaccgaaatgagactccctcagatccagtgataattgacagattcttcctgaagtttttccttaagtgtaaccaaaattgcctaaagaatgcggggaacccacgtgacatgcggagattccaggtcgtggtgtctaccacagtcaacgtggatggccatgtcctggcagtctctgataacatgtttgtccacaataactccaaacacgggcggagggctaggaggcttgacccctcggaagcagctactccctgtatcaaagccatcagcccgagtgaaggatggacgacgggaggcgcgactgtgatcatcataggggacaatttctttgatgggttacaggtcatattcggtaccatgctggtctggagtgagttgataactcctcatgccatccgtgttcagacacctcctcggcacatccctggtgttgtggaagtcacattgtcctacaagtccaagcagttctgcaaagggacaccaggcagattcatctatacagcactcaatgaacccaccatcgactatggtttccagaggttacagaaggtcattccccggcatcctggtgacccagagcgtttgccaaaggaagtgatccttaaaagggctgcagatctggttgaagccctgtatgggatgccccacaacaaccaggagattatcctgaagagagctgccgacattgctgaggctctgtacagtgtccctcgaaaccacaaccagctcccggccctcgctaacacttcggtccacgcagggatgatgggcgtgaactccttcagtggacaactggctgtgaatgtctctgaggcatcacaagccaccaatcaaggtttcacccgcaactcaagcagtgtgtcaccacatggatatgtgcctagcaccaccccacagcagaccaactataactctgtcaccacaagcatgaacggctacggctctgccgccatgtccaatttgggcggctccccaaccttcctcaatggctcagctgccaactcaccctacgccattgtgccatccagccccaccatggcctcatctacaagcctcccctccaactgcagcagctcctcgggcatcttctccttctcaccagccaacatggtctctgctgtgaaacagaagagtgctttcgcaccagttgtcagaccccagacctccccgcctcccacctgcaccagcaccaacgggaacagcctgcaagcgatttctggcatgattgtccctcccatgtgaaagaattgccttgaagaattttattaatgaagaggttggatcctgctacgaaagtaatctgacatgagtcccagagtggaacttttaactcaggcctttttaagaggaaatcacacaataactgcagatttttaaacaaagtcaccgaccttgcaaatactgagattggaaaggggacctgccagagcggggtgttggatagagtcggactccccgagtgtctgggggatatatttattctgtattgataaaaaaaagaacaagcccaccttttctttttttctttctcttttctttctttaagcttaactctgcaaccatttgtcttttgtaaaccattaagctacacacaagggccactctaaataagactccatgttttaatttatgatgtttttaaagctatgtaaggggagaatgaagtggtgatatttac

SEQ ID NO: 347 - DNA, 1531 bp, Rattus norvegicus
ggccagccagcttcatcacttttgtaaactgcatgtactttctgagcatatttattcagttgaaaagacaccctgagcgcaaatatgagcttaaggagcccacggaggagcaacagagattggcagccaatgaaaatggcgaaataaatcatcaggattcaatgtctttgtctctgatttctacatcagccttggaaaatgagcacacttttcattctcagctcttgggggccagccttactttgctcttatatgttgcactgtggatgtttggggctttggctgtttctttgtattaccctttggacttggtttttagcttcgtttttggagccacaagtttaagcttcagtgcattcttcatggtccaccattgtgttaatagggaggatgttagacttgcgtggatcatgacttgctgcccaggacggagctcgtattcagtgcaagtcaacgtccagccccccaactctaatgggacgaatggagaggcacccaaatgccccaatagcagtgcggagtcttcatgcacaaacaaaagtgcttcaagcttcaaaaattcctcccagggctgcaaattaacaaacttgcaggcggctgcagctcagtgccatgccatttatttacctttgaactccacccctcagcttgataatagtctgacagaacatttaatggacaatgatattaaaatgcacgtgccgcctttagaagttcagtttcgaacaaatgtgcactcaagccgccaccataaaaacagaagtaaaggacaccgggcaagccgactcacagtcctgagagaatatgcctacgatgtcccaacgagcgtggaaggaagcgtgcagaacggcttacctaaaagccggctgggcaataacgaaggacactcgaggagccgaagagcttatttagcctacagagagagacagtacaacccaccccagcaagacagyagcgwtgcttgtagcacacttcccaaaagtagcagaaattttgaaaagccagtttcaaccactagtaaaaaagatgcgttaaggaagccagctgtggttgaacttgaaaatcagcaaaaatcttatggcctcaacttggccattcagaatggaccaattaaaagcaatgggcaggagggacccttgccggtaccgatagcactggcaatgttaggactggattatggaaacacgaaactactgtgtaacattgctgggcttcctaggcagaattcatataaactgtgatactcacattccttgaagctatgagcatttaaaaactatttacagccagcatagggattcaaaaggatttagaataaactttgaagttttggattttacttatttttatccccaaattgttgctattttttaggatctgaaacaaaatctttctaaaacattgttttagttgtcaaagcaccaacaggacattttgggatgtgaaatgtaatttcttggaatctgtaaattgtacttaatatttcaggcttgtatttaatataataaataggtgtttgttaaaaaaaaaa

SEQ ID NO: 348 - DNA, 1078 bp, Rattus norvegicus
agcagctgggtaggcaccatggccgggagcaccaccatcgaggcggtaaagcgcaagatccaggttctgcagcagcaggctgatgatgcggaggagagggctgagcgcctccagcgggaagtggagggagaaaggcgggcccgggagcaggctgaagctgaggtggcttccttgaaccgtaggatccagctggttgaagaggagctggaccgcgcccaggagcgccttgccactgctttgcagaagctggaggaagcggagaaggctgctgatgagagtgagagaggtatgaaggtgattgaaaaccgggctctaaaagatgaagaaaagatggagctccaggaaatccagctgaaggaagcaaagcacattgcagaagaggcagacaggaagtatgaagaggtggctcgtaagttggtgatcattgaaggagacttggaacgcacggaggaacgcgccgagctggcagagtctaagtgttctgagctggaggaggagctgaagaatgtcaccaacaacctcaaatctcttgaggctcaggcggagaagtactctcaaaaagaagacaagtatgaagaagaaataaagattcttactgataaactcaaggaggcggagacccgggctgagtttgctgaaagatcggtagccaagctggaaaagaccattgatgacttggaagagcgtctctacagccaacttgagcgaaaccgcctgctttctaatgagctgaagctaacgctgcatggtctttgtgactgacgggccgggctccctgatgcccagtaaacccacaccactgacctggacccagccaaaagctgactgccttttaaaaagtcactgttcgccctaagcaagttgctttttaatgagggcagctagactactgttgatttcctggcagcccccttcaagttgcaatggctatttctattctagaagagattgtgggtgatgaagatggggcctgggaggtttagtgcagaacttgaaaaccgttagctgcagccctctcacctgtatactgactgtagggtttgctcacctgcatggttattttctaacaataaaaaca

SEQ ID NO: 349 - DNA, 872 bp, Rattus norvegicus
gactcggcctcgcgcgtccattggtcggctgcgtgaggggaggagccgctgcccgccgagatgagctggggccgtctgagccgcttattgaagccagcactgctgtgcggggctctggctgtgcctggcctggctggcaccatgtgtgcatcccgcgatgattggcgctgtgcgcgctccatgcacgaattctcagccaaggacatcgatgggcacatggtttgcctggataagtacaggggttgcgtgtgcatcgtcaccaacgtggcctcgcaatgaggcaaaaccgacgtaaactacactcagctagtcgatctgcatgcccgatacgccgagtgtggtttacgaatcctggccttcccttgcaaccagttcgggaggcaggagccaggaagtaatcaagaaatcaaggagtttgcagccggctacaatgtcaggtttgacatgtacagcaagatctgtgtaaatggggacgatgcccacccactgtggaaatggatgaaagtccagcccaagggcaggggcatgctgggaaatgccatcaaatggaactttaccaagtttctcattgataagaacggctgcgtggtgaagcgctatggtcccatggaggagccccaggtgatagagaaggacctgccgtgctatctctagccctacaagtgttggcccctgcaccgagcccccctgccctgtgacccctggagccttccaccccggcactcatgacggtctgcctgaaaaccagcccgctggtggggcagtcccgaggacctggcgtgcatccccgccggaggaaggtccagacgctgtggccccgggctcgaggcttcaccttggctgccttgtgggaataaaatgtagaaatgtgc

SEQ ID NO: 350 - DNA, 649 bp, Rattus norvegicus
aaggccaagaaggccatcactgacgccgccatgatggcggaggagctgaagaaggagcaggacaccagcgcccacctggagcggatgaagaagaacatggagcagacggtgaaggacctgcagcaccgtctggacgaggctgagcagctggcgctgaagggcggcaagaagcagatccagaaactggaggccagagtgagggagcttgaaaacgaggtggaaaatgaacagaagcgcaacattgaagctgtcaagggtcttcgcaagcatgagagaagagtaaaggaactcacctaccagaccgaggaggaccgcaagaacgtgctgaggctgcaggacctagtggataaattacagactaaagtgaaagcctacaagagacaagcagaggaggctgaggaacaatccaacgtcaacctggccaagttccgcaagatccagcacgagctggaggaagccgaggagcgggccgacatcgccgagtcccaggtcaacaagctgcgggtgaagagccgagaggttcacaccaaagtcataagcgaagaatagctcaattccttctgttgaaaggtgacagaagaaatcacacaatgtgacgttctttgtcactgtcctgtatatcaaggatccaagtcataagcgaagaata

SEQ ID NO: 351 - DNA, 1439 bp, Rattus norvegicus
ctttagagccaggtacggacgcggcgggagctccgcaccagccacctaggccctcgctgccagccccgtggcggggcagccgcaggagccctggctgtggctggggggcagtgggccatgccaggggcagtggaaggccccaggtggaagcaggcagaagacattagggatatttatgacttcagggatgttctgggcacgggtgccttctcagaagtgatcctggcagaggacaagaggactcagaaactggtggccatcaaatgcattgccaagaaggccctggagggcaaagaaggcagcatggagaatgagatcgccgtcttacacaagatcaagcaccccaacattgtagccctggatgacatctatgagagtgggggccacctctacctcatcatgcagctggtttcaggtggagagctgtttgaccgaattgtggagaaaggattctacacagaacgggatgccagccgcctcatcttccaggtgctggatgctgtcaagtacctgcacgacctgggcattgtgcaccgggatctcaagccagagaacctgctatactacagtctggatgaagactccaaaatcatgatctctgactttggcctctccaagatggaggacccaggcagtgtgctctccacagcctgtgggactccaggatatgtggcccctgaggtcctggcccagaagccctacagcaaggccgtggactgctggtccataggagtcattgcctatatactgctctgtggctacccgccgttctatgatgaaaatgatgccaaactttttgaacagattttgaaggctgagtatgagtttgactctccttattgggacgacatctctgactctgccaaagatttcatacgtcatttgatggagaaagacccagagaagaggttcacctgtgagcaggccttgcagcacccctggattgcaggagacacagctctggataagaatatccaccagtcagtgagtgagcagatcaagaagaactttgccaagagcaagtggaagcaagctttcaatgctaccgctgtggttcggcacatgaggaagctgcagctgggcaccagccaggagggacagggacagacagctagccacggagagctgctgacacccacagctggggggccagcagctggctgctgctgtcgagactgctgtgtggagccaggctcagaactgccccctgcaccacccccaagctctagggccatggactgaacatcaaggagtcagggtttcgtccgtgaggggttggaggcagcctgcttcctcctcaccccagaactggggagtttctgaccccatacttcttccctcccctctcactcttcactgcattttccatacaaatgtttctattttattgttccttcttgtaataaagggaagataaaacaaaacagttaaaaaaaaaa

SEQ ID NO: 352 - DNA, 1666 bp, Rattus norvegicus
cggcagccgagtcggattgagctgctgcagacgccaggccactccagccagcactgccgttttcacgccccggctgcagacagctaggaggctttatctagtttgaaccaggctgctggagctcgctccttccctctctttttttccacgaggctgtttttttatttggctgcaattgcatgaaatcccaatggtgtagaccagtggcgatggatctaggagtttaccaactgagacatttttcaatttctttcttgtcgtctttgctgggaactgaaaacgcttccgtgagacttgacaatagctctggtgcaagtgtggtagctatcgacaacaaaatagagcaagctatggatctggtgaaaagccatttgatgtatgcagttagagaggaagtggaggttctgaaggagcagatcaaagaactaatagagaaaaactcccaactggagcaggagaacaatctgttgaagacactggccagtccggagcagctcgcccagtttcaggcccagctgcagactggctcccctccggctaccacgcagccacaggggaccacacagccccctgcacagccagcgtcccagggctcaggatcaaccgcatagcctgctatgccccaacagaactggctgctgctgtctgaactgaacagaccgaagagatgtgctagtgagaagccgcctccagtcacccatttcattgctgtctgcgaaagagacgtgagactcacacatgctgttctcgctttctccccagtattaagcactcatatgcttttggcttgaagaaatatactagttgagtgaattaaaggttaaacagagagtgagcatggatgtaccctgtgcaacgtggcagatgtctgaggaatggtttgattgacgctgaggaggagctctgtgccttttcaaccctccccagccgcccactctactcccaagctctggggctcgcctgcatggggctcagaaggtgggctgctcctggattttgtgttctcctctccttcccttcaaagaatttgagaggccagaaacgagactgcaaagggggggatgcagtccttttacaaaaccgacaactgtcaccaaagcttataaaacaggacagtactgtccctcttttctgaaacatcagaagacacaaaactgttagtgacacaacggtgacaggtagctgggacctaggctatcttattatgaaggttgttttgcttgttgtatatttgtgtatgtagtgtaacgaatttgtacaatagaggaccgtaactactgttaggttgtacagattgaagtttagatgttccattggctgtctgaaaaggtgtggattgtccttcctagagagatctacttaaaaactgcttcgtgacaaaaaccacacctgaagaaattttaagaatttggcacagttagtcactttgtgtcacccggaatctagctgctgagtcttgcaaagtaaaccccctgttgactgatgtcagttgagctagtgaatgaatagatggagaaacgtcagtcagttgctgaggaagtggatttcccagtaggggtttctgcagctcacctgtatagtcctgcgcatgttccccacacagaacccactgtatttacctgttctacttgtcacctttcaataaagcatatcaaatgttgatacc

SEQ ID NO: 353 - DNA, 3678 bp, Rattus norvegicus
gttccaatgtatatatctcattttacttatttccttttctgtcatattgggctatttcctgcctctttggaagtatagttaaatttgtgctgctgcagaagccctgtatgcaagcctagtccgctcttcttctgatgtgtcttacgtagggggtcctcaaagccccacagagctgctggactggtaagatgcctgttgtgattcctaggaggttcactgagcaagcatttggaagttcctgacttagaattccatgcttagtgtgtataatttctgtatcccttgggatatagctattagactgaaatatttcagtgaattttaccaacttctatatttttacgtgacagaaaaatgatgtgctttttcatgtcttataatagagcctgaacactcaatattcgcctgtggtaatttgattatttaaagaaagtatattactaactcagatatgtgttctgccaagccaagttccacattctggagattttcctaagtaagcagtcataagacccccttgaagtgatttgtgacttttgtgcaaatagagttatggtgttaatgttccaaataatgtccttaaaagcaggggtttcacccatgactcagcgacatcagtcacactaacggagatgagccatgactgcccatggtttaaagtcctgaacgccccctccgtactgcttgtccttggtctaaggattgggaagagtcagggctacttccagccagaccgctctctagggttattagtcacggctgtattatagggaacaaggtatctagtgttgcagatgcactggggacatagtatagggatttaaactatgcagtagagagattttagtgtaagttcagaattgtgaataatggtatcactcgagtttactgaaatgttggtagcattcgtggtttgccagtcataagtgtgcctggtttcagttcgtcactttggatatctctcaactgtttgggcactaaagtgcagttatgagtagtacatcatctgaagaccaaatggatgggaataaagtctatgccaggacaagcctggacacaccgtggtggtcatagctggactgcgggaaggacaggatgagcctggaactctttagagtaagaagtcagagtgtgtgtgacgtgatgtgcctgcatcacaggcactgtttgactctgcaactgggcagacctcaggtaatggagacagtaacattgtagcttattgaataaaacacaaatctgtaaataaggaaatttggggggatggcatgaaattagtggcgaagaatagtatgtttatcttaccacccaaaatatctcaacagaaaagacctgtcattaaaagattgttttaaaagaaaatacctgttaattttaaaaggtgacggtatcatggagaaatctgagcagtcactacctgaatcatagggtcaaatcaaaatcctgtgccaccttatagaataccatttttactaaagatacatggctttagatgtacattagaaaaaccataggtaaatattgtctatagaactgctggcctgagagcatcagatgcatcaagacaaggcaagactgaaatcctagtccagattgagtgcagccagtcagaagtgcagtctgtattccttggaagtgctgtatgtgtgtgggtttcaaggacatgattgttcagttgtgatttagttaaggaaatactcttgcttccggctctatacaccaacattagatgtgatgaagcctaatcgcagtaaatgcttctagagagatgatgtttttgtagtgtcgttacagcttttctgtagccaggtgctttagcttgttttatgatgaatcaggaaaaaaagtttatgtttctagctaatacaagatcagtgtcgtgtgaaaacacagaaaataggactcagacacactctgtgaaaatgtccaaagactgagtacctcatgggacacttgagtgagattctcagctcatcctcctggctcagttctagtcactgtttctccccacagtctataaggcccatgtgacctttatgagaatcttgattgtgtagcaagagcgagctcacagattctagtgtctgactagagaaccagctgtgaagatagctgtttgggttgcctgaggattgtttttaaagatttatgtatttcatgtggattagtactctatctgtgtgtgtatataactgctagacgaaggcattggatcccattacagatagatggttgtgagccaccatgtgggttgctgggatttggaactcaggacctctggaagagcagccagtgctcttaaccactgaaccaactctctaacccttaccttagtagtgtggctatctatcaaaataaagttttattaaaattactttcttccaggtggcaatgatggtcctttctataatgtttgtttacaattgtcactctattaaaaaagagtgggaacattctgagatctgttttcccaccttggaaatttaatccttgtccactagtaacactggttaaactaactcagtacatgggtgagatgcttttatttaactcgtgtccactgaaacccgctatactttgtttgtcattgtgtaggaacaaccctggctgtcctataattcagagatccacctacctctgccttcagagtgctaagattaaaggtgtgtgccaccaccgcctggcttcaagttagattttttatttcttgtgtatgcacttttcccacttatattacaagtttctagctctgtgcaaaacatgaagttgtttatggatgtgagctgatgtttgtgcacttgtctggagcctggaaactgcttccatacgttctcattggggtctctaccacaggcctgtggaataacagtaggtttttgttttttgttttttgtttttttcttgttttaccgaataaaaactggagacttagaaacatgtatctgatggttgttttaataaattagatggcaaaactcaaggctttggaaagtataattgtatacagttgccctttgtattgggatatgtacttaatggtttgtcgaagagacaattccttgttatcagcagtgatgtgcccttttcttatcctcagtccttcctgccccagaaggagctttggaactgagacatttattctgtgaaaacacctagttaaaggaacaccacatgcatggtgaagtcatgcatatgaagtcagttgatgaattgaaggaagcctgtctttatttgacctgtaaactgtctccagacggccaggtcccactataaacagaggtgcctaaaacctggatgtttccccctttgctggtctcaaactctgtgtatctagaaggactttgaacttcatgttcaccttgctcccacctactgagtgctgggggcaagggtcccaggcccaatccaccagggctttgcttgtgctcagcaaattctcccaacttagccacagtcccaggccccagactaaagagctctccagtgcactgtgttcattcctgagtcctaagggtgcagctatgcgatacaccaaccctttccgttttaactggctgtaattctaaatttagggtttttgttgagcagaattaagagtgttgaaatgttctctatgtagtttctgtatatgtcttcatatttaccaatataaacataaaaataaaatatatgaaatat

SEQ ID NO: 354 - DNA, 4269 bp, Rattus norvegicus
taagctggtgcttacggacagagagccacactcgggctttctcgaagaggtaaaccaggtccctctgcagccatgtcagccaaggcaatttcagagcagaccggcaaagaactcctttacaagtacatctgtaccacctcagccatccagaaccggttcaagtatgcccgggttactcccgacacagactgggcccatctcctgcaggaccacccctggctgcttagccagagcttggtagtcaagccggaccagctgatcaaacgtcgaggaaagcttggtctagtcggggtcaacctctctctggatggagtcaaatcctggctgaaacctcgactgggacatgaggccaccgtcggcaaggccaaaggcttcctcaagaactttctgattgagcccttcgtcccccacagtcaggcggaggagttctacgtgtgcatctatgctacccgggaaggagactacgtcctgttccaccatgaagggggtgtggatgtgggcgatgtggacaccaaagcccagaagctgcttgtgggtgtggacgagaaactgaacgctgaagacattaagagacacctgttggtccacgcccccgaagacaagaaagaaatcctggccagcttcatctccggcctattcaatttctacgaagatctttacttcacctaccttgagatcaacccccttgtggtgaccaaagatggtgtctacatccttgacctggcggccaaggtggacgccactgctgactacatctgcaaagtcaagtggggtgatatagagttccctcccccctttgggcgtgaggcatacccagaggaagcctacattgcagacctggatgccaaaagtggggcgagcttgaagctgaccttgctgaaccccaaggggcggatctggaccatggttgccgggggtggcgcctctgtcgtgtacagtgataccatctgtgatcttggaggtgtcaacgaactggcgaattacggggagtactctggtgcccccagtgaacaacagacctatgactacgccaagaccatcctctcacttatgactcgagagaagcacccggatggcaagatcctcatcattggaggcagcattgcaaacttcaccaacgtggccgccaccttcaagggcattgtgagagcaattcgagattaccagggttccctgaaggagcacgaggtcaccatctttgttcgaagaggtggcccgaactatcaagagggattacgagtgatgggagaagttgggaagaccactggaatccccatccatgtctttggcacagaaactcacatgacggccattgtgggcatggcctgggcaccggccattcccaaccagccacccacagcggctcacactgccaacttcctccttaatgccagtgggagcacatcgacaccagcacccagcaggacagcgtctttttccgagtccagagctgacgaggtggcccctgcaaagaaagccaagccagccatgccccaagattcagtcccaagtccaagatccctgcaaggaaagagtgccaccctcttcagccgacataccaaggctatcgtatggggcatgcagacccgggctgtgcaaggcatgctggactttgactacgtgtgctcccgagatgagccttcagtggctgctatggtctacccgttcacgggggatcataagcagaagttttactggggacacaaggaaatcctgatccctgtcttcaagaacatggctgacgccatgaaaaagcatccggaggtagacgtgctgatcaactttgcatctctgcgatcggcttatgacagcaccatggagaccatgaactatgcacagatccggaccatagccatcatagcagaaggcatccctgaggctctcacacggaagctcatcaagaaggcagaccagaagggcgtgaccatcattgggccagccacggttgggggcatcaagcctggatgctttaagattgggaatactggtgggatgctggacaacatcctggcctccaaactgtatcgcccaggcagtgtggcctacgtctcgcgttcaggaggcatgtctaacgaactcaataatatcatctctcggaccacagatggtgtctacgagggtgttgccatcggcggggacaggtaccctgggtccacattcatggatcacgtgctgcgttaccaagacactccaggagtcaagatgattgtagttcttggggagatagggggtacagaagaatataagatctgccggggcatcaaggagggccgcctcaccaagccagtggtctgctggtgcatcgggacctgtgccaccatgttctcttctgaggtccagtttggccacgctggggcttgtgccaaccaggcttctgaaacggcagtagccaagaaccaggccttgaaggaagcgggagtgtttgtgccccgaagctttgatgagctcggagaaatcattcagtccgtgtatgaagatcttgtggccaaaggcgccattgtacctgctcaggaagtgccacctccaacagtacccatggactactcttgggccagggagctgggtttaatccgaaaacctgcctcattcatgaccagcatctgtgacgagcgggggcaggaactcatttatgcgggcatgcccatcaccgaggtcttcaaggaagagatgggcattggtggtgtcctgggcctcctctggttccagagaaggttgcccaagtattcctgccagttcattgagatgtgtctcatggtcaccgctgatcacgggccagctgtctccggggcccataacactatcatctgtgctcgggctgggaaggacctggtctccagcctcacctcagggctgctcaccattggggaccggtttgggggtgccttggacgcagcagcgaagatgttcagtaaagcctttgacagcggcattattcccatggagtttgtgaacaagatgaagaaggaggggaaactgatcatgggcatcggccatcgagtcaaatcgataaacaacccagacatgcgagtgcagatcctcaaagactttgtcaaacagcacttccccgccaccccgctgctcgactatgcactggaagtggagaaaatcaccacctcaaagaagccaaatcttatcctgaacgtggatggtttcatcggcgttgcgtttgtggacatgcttaggaactgtggctccttcacccgggaggaagctgacgagtatgttgacattggagccctcaatggcgtctttgtgctgggaaggagtatgggcttcatcgggcactatcttgaccagaagaggctgaagcaagggctgtatcgtcacccctgggacgacatttcctatgttctcccggaacacatgagcatgtaaccgagccagcagccctaccgtagaaaaaggaagacaaaaactccctcctcgacaatatagcggacagacagctggaaacagagcccgttatgggctgggcctggaatggaaatagccattgatgtgcaggcatggaaagccaacaccacaggcccattcagtccacacagagaagcttagtatttttttttatatatatatctatatatatataagcatagaaatttaaaaccaagccaatacttgtgacgtttgcgctgctacctgctgtatctattacatggaagactgtaagcaagcgctgtcagaataatgttcttctagggccttatgatgttgctttctttttttaattagttgaaaatttatttttcctctagaactagtggatccgacttttaagacttcaggatactatctgtttgtaggaccactgtctggtatcccacctcccactcatcttcacaccacatgaagaacactgtattaatctgattttttaggatctttttttttttttttgtgttatgtgttaagggtttatttagtatcccactgaaacgttctgtgtttcggaccaatgtctacttatgtcaaggggaggagggttggggccattgtacccttagccatcgtcacacatgtggagtagtaacttaaatgtaaagttgtaacatacaagtgtttaaaatggaaaccgcaaagcaaaaagctgtgaaacgtctcgtgtcttgtgttctctgtgttcatgcagctgacttgtctgttactgaagtgtgggtccaaagactcacatctgttccgcatctgtaacccacagagattctggcagctgccacctcagtctcttctctgtattatcatgtttggtttaaataaactagatagtaaaaa

SEQ ID NO: 355 - DNA, 1814 bp, Rattus norvegicus
ccaaggcagaaaagtaactgtcaaatgcgcggctcctttaaccagagcgcccagtccggctccgagagtcatggcgaccgcagcgtctaaccactacagcctgctcacctccagcgcctccatcgtgcacgccgagccgcctggcggcatgcagcagggcgcggggggctaccgcgaggcgcagagcctgcaggtgcagggcgactacggtgcgctgcagagcaacgggcacccgctcagccacgctcactggatcaccgcgctgtcccacggcggcagcggcgggggcggcggcggtggtggaggaggcgggggaggcggcgggggaggcggcgacggctccccgtggtccaccagccccctaggccagccggacatcaagccctcggtggtggtacagcagggtggccgaggcgacgagctgcacgggccaggagcgctgcagcagcagcaccaacagcaacagcagcagcagcaacagcaacagcagcaacaacagcaacagcagcagcagcaacaacagcgaccgccacatctggtgcaccacgctgccaacaaccatcccgggcccggggcatggcggagtgcggcggctgcagctcaccttcctccctccatgggagcttccaacggtggtttgctctattcgcagcccagcttcacggtgaacggcatgctgggcgcaggagggcagccggctgggctgcaccaccacggcctgagggacgcccacgatgagccccatcatgcagaccaccacccgcatccgcactctcacccgcaccagcaaccgcccccgccacctcccccacaaggcccaccgggccacccaggcgcgcaccacgacccgcactcggacgaggacacgccgacctcagacgacctggagcagttcgccaagcaattcaagcagaggcggatcaaactaggatttactcaagcagacgtggggctggcgcttggcaccctgtacggcaacgtcttctcgcagaccaccatctgcaggtttgaggccctgcagctgagcttcaagaacatgtgcaagctgaagcctttgttgaacaagtggttggaagaggcagactcatcctcgggcagccccaccagcatagacaagatcgcttcgcaagggcgcaaacggaaaaagcggacctccatcgaggtgagcgtcaagggggctctggagagccatttcctcaaatgccctaagccctcggcccaggagatcacctccctcgcggacagcttacagctggagaaggaggtggtgagagtttggttttgtaacaggagacagaaagagaaaaggatgacccctcccggagggactctgccgggcgccgaggatgtgtatggggggagtagggacacgccaccacaccacggggtgcagacgcccgtccagtgaactcaagcaggggaggggcagagcttggggctcccctcccctttggtccacagtctcaactgggacctctgttccccctgtaacttctgattgttttttttttttaattattattttcccggtcccttaaaaagagaaaaaaatagagaaattaaggagaaaggaaagtaaaagtaaaacactggactaacctataacaggtagcaggtgtattcatgggttttgacctttgcaagcgagtacccaggcaatgaagtagaatgtctcctagtaagagtgaagtgtgtgtgtgtgtgtgtgtgtgtgtgtgtgtgtctgtgtgtgaaagagagagagagagagagagagagagagagagagagagagagagagagggaggagtcctggtaaaactaaataaattacc

SEQ ID NO: 356 - DNA, 3808 bp, Rattus norvegicus
gaactagcctgacctggacttgcccggcagaagcgacagtggtcggagggcgacgagattttaggggcagcacctgaagcacaattcgagtcctgcgccagggcacgggccattgtccggatccagaaagtcggtcaccggggaagaaaaatggccagtgatacaccaggtttctacgtggacaaacttaacaaatactcccagatacacaaagtaaagattatatataaagaaatttctgttacaggacctccacacgacagaaggtttacatttcaagttataatagaagagagggaatttccagaaggtgaaggtagatcaaagcaggaggcgaaaaataatgctgccaaattagctgtcgaaatacttgataatgaaaacaaggtggatagtcacacggatgcttctgaacaaggtttaatagaggggaactacattggccttgtcaattcttttgcccagaaggaaaatctgcctgtaaattttgaactgtgtgaccccgactcccaattgcctcacagatttatttgtaaatgcaaaatcgggcagactacgtatggtactggtttcggtgctaacaaaaaggaggcaaagcagttggctgccaaaaatgcgtatcagaagctgtcagagaaaagcccatcgaaaactggctttgtcacatctttatccagtgacttttccagcagctcgtctataacaagtaactctgcttctcagtcagcatctggaagggatttcgaggacatatttatgaatggtctcagagaaaaaaggaaatcaggagtaaaagtgccatctgatgacgtgctaagaaataaatataccttggacgacaggtttagcaaagattttgaagacatagaagaaattggctcgggtggatttggccaagttttcaaagcaaaacacagaatcgatggaaagacgtatgctattaagcgcattacatataacaccaagaaggcaaagcgtgaagtacaagcactagcagaactcaatcacgccaacattgttcaataccgagtttgttgggagggagaggactatgactatgatcccgagaacagcacaaacggtgacacaagtcgatacaagacccggtgcctctttatccaaatggaattctgtgataaaggaactctgcagcagtggttggaaaagagaaatcggagtcaagaggacaaggctttggttttggagttatttgaacaaatagtgacaggagtggattatatacactcgaaaggtttaattcatagagaccttaagccaggtaatatatttttagtggatgaaaaacacattaagatcggagactttggccttgcaacagccctggaaaatgatggaaatcctcgaacaaagtatacaggaactcctcaatacatgagtccagaacaaaagtcatcgttagtggaatatggaaaggaagtggacatctttgctttgggccttattctagctgaacttcttcacatatgcaaaactgattcagagaaaatagagtttttccaacttctaagaaatggcatcttctccgatgatattttcgacaacaaggaaaaaagccttctacagaaattactctcaagtaaacccagggaacgacccaatacgtctgaaatcctgaagactttggctgagtggaagaacatctcggagaaaaagaaaagaaacacgtgttagggcttttaactgcagtctgaagtggaatgtcagagaacaatgaacttcttctcttaacactctcccagacaggttttggtaagggtgacccaaagacattgtatttatcggctatgaacaagtatgcccgtttcctcaattgttaattgtcggacctgtggctggctagccaaatatggaaatgtttgtttctttctcgtctgcccgaagagaaagccaagccgcggtggagaaggtcacttaacccccaatgctaactgaaggcctaaggcttttgacatactaaagagctggcagccagagctgggagagaagaacctgcagacaggcaggcagagacacaaagacatggactagaatgaaacaggaaggtagagagattgagagacagagccacatggagagacgaaatggcagagtagtaggcttaagttagatgagctaactgagagactgccccagaaaacaggccaacagccttatacacagatgtctcagtgtctatcattaaactccaagcaggatcaatgaaggccctacaataggtttttttttcttgttacttcaaaaacaatcttacaaagttattttcttgagagttccatatgtgtattgtatcctgatcacactccaaaccttctgctgttcatgccttatcatgtgaactatacctctgaacgtgggagtccaaattgtccatctgctccttaacgttacttctcataggtagtttagtcgttgtgatgagaaaagtaatgaaatggtaccagaaatggggttttgtcgcaataaacctactgtgcggtttcttggactttcaggactggtttgtgggaagaatgtggaaaagtttgaagcagcaggctagagaagtcctcagatggtatacgtcaatcttaattctggtagctcagaagtctttgccaaaaaggaacccattgggaattggactagatgccaggacatttgtgtacaagtcaaaagactggtgagggaaatttcaagacattcagactgtggcatggtggttatctccttctcatagctagaattatagagcaaattaggaaggagtgaggggtaagaagtgagagaacaaagatctgggaatgagtgccttcaaagacgaggtcggtgcaaagctgttaaagcgattagtgcactgagggaagccatgtactttccattgctgccattataggaacaagactacagccacgggcggctgcacagcatggaaagtaaaagccctttaaaggtctttcgtgtcaaaagttccagcaggtgccacagccactccagtggagtctgtgtgacaggaagctcttgtgcttcgtttctatgcagaacagaggcctgtgcctggaatggcttgtcctcctggaggtcctggcagtctccctgcaaaaagatggtgaccagggtctatgctttcagtggaattgccttctgtgttctagccttggtgatcttagcgattttaagcctgtcaacaatatctgattttaggaatatagcagggtgggcagatgatcatgtatctttagatgtctcaggcactgaaataaataaatgtctcacaccatcatggtcctgatgaactcaatggctgcaatgaattcaactgctgtatccattagttcccagaaaataggagagaaattaattgcagttactaagaacatgactgttccagaaaaatctttccccccttttgggaaagttttgtttagcatgattcagaatagtaatgattcttttaaaaaagatcatagacaacttccaacaagttgaacaaacttaacagagttaactatggttacttttgcttccttactattctgaggggccataaatataatagagtttaaactttattaaaacaaaggtaaatgatgaatacatacctggtgcccaccagtctggcagtataactgcagttttctaaactattgttttcagctgagaattgttttctagactgtatgttccgctttcctccttgcaagggacatttggtgaggagatgaataagagctagatgattgccaattatgatgtatctgttctaactgtttaagtctatgccaaaaagtaaagctttttacaacaacac

SEQ ID NO: 357 - DNA, 2221 bp, Rattus norvegicus
ggtgtgtccccagtgcctccgaagtccctctctccagccgcacccatgcttctggcacgaatgaagccgcagtgcagcctgagctcggcggggcggaccagctgcccgagcagcccctgaggccctgcaaaaccgctgatctgctagtggtgaaggagcgcaacggtgtccagtgtctcctggcatcccaggatggtgacgcgcacccgggagacttggggcaagaagattgatttcctgctgtctgtggtgggcttcgcagtggacctggccaatgtgtggcgcttcccctatctctgctacaagaatggtggtggtgccttcctgattccatatacactgttcctcatcattgctgggatgcctctgttttacatggagctggctctggggcagttcaaccgggagggggcagccacagtgtggaagatctgccctttcttcaaaggagtgggctatgctgtgatcctcattgccctctatgttggcttttactacaatgtcatcatcgcctggtcactgtactacctcttcgcgtccttcaccttgaacctgccctggaccaactgtggccatgcctggaacagccccaactgtaccgaccccaaactcctcaacgcctcggtgctgggcgaccataccaaatactccaaatacaagttcacaccggctgcagagttttatgagcgtggtgtcctacaccttcacgagagcagtgggatccatgacatcggcctgccccagtggcagctgttgctatgcctgatggtcgttatcgttgtcctgtatgtcagcctctggaaaggagtgaagacatcgggaaaggttgtctggatcacagccaccctgccttactttgtcctctttgtgctcctggttcatggcgtcactctgcctggtgcttccaatggcatcaacgcctacctgcacattgacttctaccgcctcaaggaggccacggtatggatcgatgctgcaacccaaatattcttttccctgggagctggatttggagtcttgattgcatttgccagttacaataaatttgacaacaactgttacagggatgccttgctgaccagcaccatcaactgtgttaccagttttatttctggatttgccattttctccatccttggttacatggcccatgaacataaagtcaagattgaggatgtcgccactgaaggagctggccttgtatttgtcctgtatccagaagccatttctactctgtcgggatccacgttctgggctgtcctgttcttcctgatgctcctggctctggggctagatagctcaatgggaggcatggaggcagtcatcaccggactggctgatgacttccaggtcctgaagcgacaccgaaaactcttcacatgtgctgtcaccctcggtacctttcttctggccatgttttgcataacgaagggagggatttacgtcctcactctgctggacaccttcgcggcaggcacgtccattctctttgccgtgctcatggaggccattggagtttcctggttttatggcgtggacaggttcagcaatgacatccagcagatgatggggtttaagccaggcctgtactggagactgtgttggaagttcgtgagccccgccttcctcctgtttgtggtagtggtcagcatcatcaacttcaagccactcacctatgatgactacgtctatcctccttgggccaactgggtcgggtggggcattgccctctcatccatgatcctggtacctgcctacgtcatctacaaattcttcagcatacggggctccctttgggagagagtggcctacggaatcaccccggagaatgagcaccacctattggctctagaaatagagctttccagccttcagagctttgttattacttcatgtcccatagatcctcttttgtcgagttttcttttcatctcctgccagaaaaccttggtgtttaagaagtcaggtccagcaccattgatttgacacttgggtagcattgagaaggcagagagggttgctctgccctgtgtttgcaggtctggggaccccacagctctgccccacaggcaggatgcctggccctggttggtgaatgtgaagtctggggggtgccttccttgctctactgtctctacatctgtgtaaataggattgtttcactcccatgttctctgtgtcacagactgttcaagtatcatttgcgggctcgagcatgcat

SEQ ID NO: 358 - DNA, 2106 bp, Rattus norvegicus
gccgtgctgccgctccagcgacatgtgcggcgggcggggaggcatctggctggctctggccgcggcgctgctgcacgtgtccctgcaaggcgagttccagaggaggctgtacaaggagctggtcaagaactacaacccgctggagaggccggtggccaacgactcgcagccgctcaccgtgtacttctccctgagtctcctgcagatcatggatgtggatgagaagaaccaagttttaaccaccaacatttggctacaaatgtcttggacagatcactatttgcagtggaacatgtctgagtaccccggagtgaagaatgttcgttttccagatggccagatttggaaaccagacattctcctctataacagtgctgatgagcgctttgatgccacgttccacaccaatgttttggtgaatgcatctgggcattgccagtatctccctccaggcatattcaagagctcctgctacattgacgttcgctggttcccttttgatgtgcagcagtgcaaactgaagtttgggtcctggtcctatggagggtggtcactggacctgcaaatgcaagaggcagatatcagcagctatatccccaacggagaatgggatctcatgggaatccctggcaaaaggaatgagaagttctatgagtgctgcaaagagccatacccagatgtcacctacacagtaaccatgcgccgtaggacactctactatggcctcaatctgctcatcccttgtgtactcatttcagccctggctctgctggtattcttgctgcctgcagactctggagagaaaatctctcttggaataactgtcttactttctctgactgtcttcatgctgcttgtggctgagatcatgccagcaacatctgattctgtgcccttgatagcacaatacttcgccagcaccatgatcatcgtgggcctctctgtagtggtgacagtgattgtgctgagatatcaccaccatgaccctgatggtggcaaaatgcctaagtggaccagaatcattctcctgaactggtgtgcatggtttctgcgcatgaagaggcccggagaggacaaggtgcggccagcttgtcagcacaagcctcggcgctgcagcctggccagtgtggagctgagtgcaggtgctgggccacccaccagcaatggcaacctgctctacattggcttccgaggcctggagggcatgcactgtgccccaactccagactctggggtcgtatgtggccgtttggcctgctccccaacacatgatgagcacctcatgcacggtgcacacccctctgatggggaccccgacctggccaagatcctggaggaggtccgctacatcgccaaccgcttccgctgccaggacgagagtgaggtgatctgcagtgaatggaagtttgcagcctgcgtggtggaccgcttgtgcctcatggccttttcggtctttaccatcatctgtaccatcggcatcctcatgtcagctccaaactttgtggaggctgtgtccaaagactttgcttaatgttatcaagtaggaaatgcgcagataagaagagaatctggagggtgagaattggggtcctaactccacagtgtgataaatggaagaactctgaggtatccctgtagctgtcaatcttgagacttagttttctggttactttaactgaaaagatctcagcagccttctgtttattcttctctcccttatcactggcatagccttgtactcagcaggggcactacgtggtcgtttgtctgctctggacagccctataggatagatcttagtggctcttgcagcccagtaaaagcctgtcctgttggtggtgcatggaaacatgccccagtcctgggctcacaagaattcgctgtctgcctttgctatgcgcagacccaggctgaaaccaatgcagagcagtccccactggatccaccgcagcaactgccatgaaaaaggaaggcaaatacaaattcaaactgcaaacttctctgctagtttctctgctagttttcctgtgattcaacttacatttctgtctgtttatctgtctgtctatctatctatctatctatctatctatctatctatctatc

SEQ ID NO: 359 - DNA, 2197 bp, Rattus norvegicus
ggaacacaaccgggaccggcaagaagccgggacctcccctcgttgcaggaactgcccgttcagtgagcactttagacctggaggccgcgagccccacccgggagcaggcggctgcgcggcttcagcaccacggacagcgctcgacccgcagccctagtatccgagaggctgcgcgctatgctggctgcatggccgggcactccaactcaatggcgctgttcagcttcagccttctttggctgtgctcaggggttttgggaactgacacagaggagcggctagtggagcatctcttagatccctcccgctataacaagctgattcgtccagctactaacggctctgagctggtgactgtacagctcatggtatcattggctcagctcattagtgtgcacgagcgggagcagatcatgaccaccaatgtctggctgacccaggagtgggaagattaccgcctcacatggaagcctgaggacttcgacaatatgaagaaagtccggctcccttccaaacacatctggctcccagatgtggttctatacaacaatgctgacggcatgtacgaagtctccttctattccaatgctgtggtctcctatgatggcagcatcttttggctaccacctgccatctacaagagtgcatgcaagattgaggtgaagcacttcccatttgaccagcagaattgcaccatgaagtttcgctcatggacctacgaccgtactgagattgacctggtgctcaaaagtgatgtggccagtctggatgacttcacacccagcggggagtgggacatcatcgcactgccaggccgacgcaacgagaacccagacgactccacctatgtggacatcacctatgacttcatcattcgtcgcaaaccactcttctacactatcaacctcatcatcccctgcgtactcatcacctcgctggccatcctggtcttctacctgccctcagactgtggtgaaaagatgacactttgtatttctgtgctgctagcactcacggtgttcctgctgctcatctccaagattgtgcctcccacctccctcgatgtaccgctggtgggcaagtacctcatgtttaccatggtgctagtcaccttctccatcgtcaccagcgtgtgtgtgctcaatgtgcaccaccgctcgcctaccacgcacaccatggccccctgggtcaaggtggtcttcctggagaagctgcccaccctgctcttcctgcagcagccacgccaccgctgtgcacgtcagcgtctgcgcttgaggaggcgccagcgagagcgtgagggcgcaggcgcgcttttcttccgtgaaggtcctgcggctgacccatgtacctgctttgtcaaccctgcatcagtgcagggcttggctggggctttccgagctgagcccactgcagccggcccggggcgctctgtggggccatgcagctgtggcctccgggaagcagtggatggcgtacgcttcattgcggaccacatgcgaagtgaggatgatgaccagagtgtgagggaggactggaaatacgttgccatggtgatcgaccgcctgttcctgtggatctttgtctttgtctgtgtctttgggaccgtcggcatgttcctgcagcctctcttccagaactacactgccactaccttcctccaccctgaccactcagctcccagctccaagtgaggtctcattcatttgcagctcctcaccccgtgacccctgcggttcagtactgggtgcaagatggatctctccccactccactgaagcctgcttcacacctccgttcacacatagtcctccagcctggaggctggacccgctgccttgtggtcgagccttctcctttccctctgagctcgttcaggcaggagtgccaatggtgggggccacggctggtaagtagaggccagagatcacagagccacctaccccgatgagggtgctggagaaggcgccaagaaagagacagagttatctgtgacctccaagtcatcggagaggaggaggtaggataaggggctcagactctggcagagtgcggctagtacttggcgcccacccacttaagtgagcgacactggtctgggaggactcgaagtgttggggagctctcttgggagctcggtctcccaccctgtacctcagagggctccagacccgggcttcaggttcccttctgccagtgc

SEQ ID NO: 360 - DNA, 1237 bp, Rattus norvegicus
cgaggcagctgtgcagtgttccccagcgaggctaagcaagaagccggcaagagcagagacgcgagggtgggagccagcgcagagccggcgccgggcactgtgggggccaggagcagcccgcgcgccgcgtgagggactcgcacttgcaatatgactttggaggaattctcggccgcagagcagaagatcgaaaggatggacacggtgggcgatgccctggaggaagtgctcagcaaggctcggagtcagcgcaccataactgtcggcgtgtacgaggcagccaagctgctcaacgtagacccggacaacgtggtcctgtgcctgctggctgcggatgaagatgacgaccgggacgtggctctgcagatccatttcaccctcattcgtgctttctgttgcgagaacgacatcaacatcctgcgggtcagcaacccgggtcggctggcagagctgttgctactggagaacgacaagagccccgctgagagcgggggcgctgcgcagaccccggacttacactgtgtgctggtgacgaacccacattcatcacaatggaaggatcctgccttaagtcaacttatttgtttttgccgggaaagtcgctacatggatcagtgggtgccagtgattaatctccccgaacggtgattccccgaacggtgatggcatctgaatggaaataactgaaccaaattgcactgaagttttgaaatacctttgtagttactcaagcagtcactccccacgctgatgcaaggattacagaaactgatgtcaaggggctgagttcaactacaggagggctaggagatgactttgcagaaggagagagaggtgagactgaaggaggaagctgtgtggaaacagaaatccaagtcaaaagggacaaaaaaactacaaagaactgtgcaagaaagaaaactattaatttaggatggccgggttacagtaaagtaaaccaaatattgctttgttgaaactttaaatgtgtagcaatattttgggtattttttttggtcttcatgccctcaaataaaagaaaagtgaaaagggttaatcatattttcaagccacagtttaatgtattttgatgagatgttaaattctcagaagttttattataaatcgtactaagttattttatgatgtgaaaggttatttatgataaaacgtttttgaagcacattatctaaaataaactggtatggaataaaaaaaaaaaaaaaaaaaaaaaaaa

SEQ ID NO: 361 - DNA, 942 bp, Rattus norvegicus
atgagtgtggccaatgagagcatctcacgggagttcattctcttagggttttcagatcggccatggctggagctgccactctttgtggtgtttctagtgtcctatattctgaccatctttggaaatatgatgataattcttgtgtcccgcctggattccaaactccacacccccatgtactttttcctcaccaacctgtccctgctggacctgtgctacacgacaagcacagtcccacagatgctcatcaacatatgcagcaccaggaaggtgatcagctacggtggctgtgtagttcagctcttcattttcctgtccttgggttccactgaatgctttcttctgggagtcatgtcccttgacaggtttttagccatctgtcggcctctccactactcagtcatcatgcatcaaaggcgctgcctccacttggcggctgcgtgttggatcagtggcttcagcaattcagtattacagtccacatggacccttcagatgccactgtgtggtcacaaggaagtagaccatttcttctgcgaagtccctgctctgctcaaattgtcctgtgtggatacgacagctaatgaagcggagctgttcttcatcagcgtgctgttccttttaatacctgtgactctcatcctcatatcatatgcttttattgtccaagcagtgttgaaaataagatcagctgaatgtcggcgcaaggcatttgggacatgtggctcccacctcattgtggtggtacttttttatggcactgccatctacatgtatctgcagccaccatccccttcttccaaggaccgggggaaaatggtgtccctcttttatgggatcatcacacccatgctgaaccccctcatctacacactcaggaacgaagaggtaaagggagccttcaagaggttgatgaaaagaatcatcttgattggaaaataa

SEQ ID NO: 362 - DNA, 2248 bp, Rattus norvegicus
atggcgtcgcccggttaccggaggctgctagctgcggctctgcttccttggtgttgcgccgcctgggccctgggacatctggacccaccttctccaccaccgctggtgatctggcatgggatgggggacagctgctgtaaccccatgagcatgggtagcattaaaaagatggttgaaaaggaaataccagggatttacgtcctgtctctggagattgggaagaacatggtggaggatgtggagaacagcttcttcttgaatgtcaacctccaagtcggaatggcatgtcagattctggaaaaggatcctaagttgcaacacggatacaatgctattggcttctcccagggaggccagttcctgagggcagtggctcagagatgcccaacacctcccatgatgaccctgatctcagttgggggacaacatcaaggtgtctttggactccctcgatgcccaggagagagttctcatatctgtgacttcatcaggaagtcacttaacgctggtgcttactccaaagttgtgcaagaacgcctggtgcaagcacagtactggcatgaccccatcaaggaggaagtgtaccgaaactgcagcatcttcttggcagacataaatcaagagaggcatatcaatgagtcctataaggagaacctgatggccctcaagaagtttgtgatggtgaaattctttaacgattccatcgtggaccctgtagactctgagtggtttggattttacagaagtggccaagctaaggaaaccattcccctccaggagaccactctatacacagaggaccgcctggggctaaagaaaatggacaaagcaggaaagctagtgtttctggctaaggaaggagaccaccttcaaatatctaaagagtggtttacagcccacatcataccttttcttaagtgaagcccttgcactttgcagcagagtttatgacaccacagctcttccaaactccagtttgcaaccagtccttctctcgtgttatcatctaacatgccctgcttggaaagatctaagatctgaatcttatcctttgccgcctgctatcaccatatggtgttgaattcaagtttaattagctagtaaccgtgcagactgctttacaaccatgtgatatggtcaagctctcttttacggaaggggagtctgctattgcagatcagcaattgtgcctaagtgaagtgaagtgaagcagagagacaagctctgagggtaaaacccatacaaatttggagcaaataaaagcctcatggtatccagtcctgagatgttcacacaagcaatttctcaacattgctgtgggggccatgcatgtttctacatcatttcttaaagctgttttcctattttagtgttgccctctagtggcacctagcagtcactccacaagcctaccaacatgccccctcagagctcaccttctatccttaatcctcagtcaccaaaagggggatccaccagcagggttgcttaggagaggaaatgtcctttttcttttcttcccttttttgagacagggtttcactcactttttaaccctagctggcctgcaattcactatgtagagcagactggccttgaactcagtcacagaaatcacctgcccctctgccttctgagtgctgggattaaaggcatgcacccccaccccctacagcaatgtgtgtcttagacaccatggatagtgcgggagtggagaagtgaaaactaggtggctggtcttgccactgcactcttggctaactgtccttaatattacaagtagcgtaaatgtcacttacactactgcaaacaatgggaggaacagtctgaaaagatggaccttgacgatcctaccctacgtcctatttgccagcatgcgtccaactgctactgactgggttcaagaaaatgactaaagagtaaaaatcaacacatattaaactgatgatgattctgacagttaaagaaaaacaacactgatccaccatttcctacatttgaacatggactccttagcccccatcctgaaaagatcccagcatgttctagatgattcctatagagactggtttggagaaatgactgttttcgtcaaagtaccattagccctgcagaatccacccactgctggtttttccttttcctttctcaaacctagtgaaataaaaggatgagggttatggggaggaagtgggaggatctgaaaatagctttgaggttgtcttaaaaaaataaagaatagtttctt

SEQ ID NO: 363 - DNA, 1670 bp, Rattus norvegicus
ccagccagggacccaggcagccacagtcctgcggtgccgcactgggatggggtgaaccctcaattctaaggagcttggcaccccacgcctgctgcagctaagatgccaacgcaacgctgggcccctgggactcaatgtatgaccaagtgcgagaactcacgccccaagcccggtgagctagcctttcgaaagggtgacatggtgaccatcttggaggcctgtgaggacaagagctggtaccgagccaagcaccacagcagtgggcaggaagggctgctggcggctgctgctctgcgacagagggaggccctttccacagaccccaagctcagcctcatgccatggttccatggcaagatttccggtcaggaagccatacagcagctgcagccacccgaggatgggctgttcctcgtgagggaatcggcccgtcaccctggtgactatgtcctgtgtgtcagtttcggccgtgatgtcatccactaccgtgtcttgcatcgagatgggcacctcaccattgatgaggccgtgtgtttctgtaatctgatggacatggtagagcactacaccagggacaagggcgccatctgcaccaagctggtgaagcccaagaggaaacagggcgcaaagtccgcagaggaagagctcgccaaggctggctggctgctagacctgcagcatctgactctgggagcacagattggagagggagagtttggagccgtcctgcagggcgagtacttgggacagaaggtggccgtgaagaatataaagtgtgatgtgacagcccaggccttcctggatgagacggctgtgatgacaaagctgcagcacaggaacctagtgcgactcctgggtgtgatcctgcaccacggcctgtacattgtcatggaacacgtgagcaagggcaacctggtgaacttcctgcgcacgcggggccgtgcgcttgtgagcacctctcagctcctgcagtttgctcttcacgttgctgaaggcatggagtacctggagagcaagaagctggtacacagggacctggctgctcgaaacatcctggtctctgaggacttagtggccaaggtcagtgactttggcctagcaaaggcagagcttaggaaggggctggactcaagtcggctgccagtcaagtggacagcacccgaggctctcaaaaatgggaggttctccagcaagtcggatgtctggagttttggggtgctactgtgggaagtcttctcatatggaagagccccataccccaagatgtcgctaaaggaggtttcagaggctgtggagaagggttaccgcatggagccccccgacagctgcccaggccctgtgcataccctcatgggcagctgctgggaggctgagccctcgcgcagaccaccgttccgcaaaatagtggagaagctgggtcgtgagctccgcagtgtgggcgtcgcagcccccgccgggggacaggaggctgagggctcagctcccacacggagccaggacccctgacccctgaactggaaagcaagaggacacagatgtagggtcacagggccagggtgagccagtgcacaggctccggagcccctgggatccccgttactgggacaccccataaagagtgattggaaggaaaaaaaaaaaaaaaaaaaaaaaaaaaaaaaaaaaaaaaa

SEQ ID NO: 364 - DNA, 3545 bp, Rattus norvegicus
ccgaagggacatcgaccctgtgaccctttagccaagccctagccccggacttcccgaagagggcaatgagtgcgtggctcctgccagcgggagggtttcccggcgctgggttctgtatccctgcgtggcagtcccggtccagcctctcgcgggtcctgcgctggccagggcctgggctgcccggactcctgctcctgctgctgctcccatctccgtctgccttctccgctgtgttcaaagtgggggtgctgggcccctgggcttgcgaccccatctttgcacgggcccgaccggatctggctgcgcgtctggccaccgaccgcctgaatcgtgaccttgccttagacggcggcccctggttcgaggttacgctgctcccagagccctgcctgactccgggctcgctaggggctgtgtcctccgcgctgactcgagtctctggcttggtgggtccggtgaaccccgcggcctgccggccagccgagctattagcccaggaagctggagtagcgctggtgccctggggctgccctggcacgcgggcggcgggtactacagccccggcggtgacccccgctgcagatgccctgtatgtcctccttaaagcattccgctgggcccgcgtggccctgatcaccgcaccccaggacctgtgggtggaggcgggacgcgctctgtccacagcactcagggcccggggtttgccagttgccctagtgacctccatggtgccttcagacctgtctggagcccgagaggccctcagaaggatccgagacgggcctagagttagagtggttatcatggtgatgcactcggtactgctgggcggcgaggagcagcgctacctactggaagctgcagaagagctgggtctgactgatggctccctggtcttcctgccctttgacacccttcactacgcgttgtctccaggcccggaggctctggctgcatttgtcaacagctccaagctccgcagggctcacgatgcggtgctcacgctgacacgccgctgtcctcctggaggcagcgtgcaagacagcttgcgcagggcccaagaacaccaggagctgccccttgacctcgacctgaagcaggtctctccgctgtttggcaccatctatgatgctgtcttcctgttggctgggggcgtgacgagagcaagagcagcagtgggtggcggctgggtgtcaggtgcatctgtggcccgccaaatgcgggaagctcaagtctttggcttttgcgggatcctgggaagaaccgaagagccctcctttgtgctgctggacacagatgcggcaggagaacggctgttcacaacacacctgctggatcctgtcttaggctccctgcgttccgctgggacccccgtgcacttccctagaggtgcacctgctccgggtcccgatccttcctgctggttcgatccagatgtgatctgcaacggaggggtggagccaggcctggtctttgttggcttcctcctggtgatagtggtgggactgactggagccttcctggctcattacttgaggcacaggctgctacacatgcaaatggtctccggccccaataagatcatcctgaccttggaagatgttactttcctccacccacaagggggcagctctcgaaaggtggcccagggaagtagatccagtctggctacccggagtacatcagacattcgcagtgtccccagccagccccaagagagcaccaacattggcctctatgagggcgactgggtttggctgaagaaatttccaggagaacaccacatggccatccggccggcgaccaagatggccttctccaagctgcgggagctccgccatgagaatgtggctctctacctgggactcttcctggcgggtacagcagacagccctgccacccctggggagggaatcttggctgtggtctccgagcactgtgctcggggctccctccatgacctcctggcccagagagacataaagctggactggatgttcaagtcttccctcctgctggacctcataaagggaatgagatatctccaccatcgtggtgtggcccacgggaggcttaagtcacggaattgcgtggtggacgggaggttcgtgctcaaggtgacagatcatggccacgggcgacttctggaagcgcagagggttttacccgaacctcccagtgcagaggatcagctatggacagccccagagctgcttcgggacccagctctagagagacggggaactctagctggtgacgtctttagcctgggcatcatcatgcaggaggtcgtgtgccgcagcacaccttatgccatgctggagctaacgcccgaggaagtgatacagagggtgcggagccctcccccactgtgccggcccttggtgtcaatggaccaggcacctatggaatgcatccagctgatggctcaatgctgggcagagcatccagagcttcggccttccatggacctcacctttgacctgttcaagggcatcaacaagggccggaagacgaacatcattgactccatgcttcggatgctggagcagtactctagtaacctggaggacttgatccgagaacgcacagaggagttagagcaggagaagcagaagacagacaggctgctcacacagatgctccctccatctgtggctgaggccctgaaaatggggacatctgtggagcctgaatactttgaagaggtgacactctatttcagtgacattgtgggctttaccaccatttcagccatgagtgagcccattgaggtggtcgacctgcttaatgacctctatacactctttgatgccatcatcggttcccacgatgtctataaggtggaaacaattggagatgcatacatggtggcctccgggctgccacagaggaacgggcagcggcatgctgcagagattgccaacatgtcactggacatcctcagtgcagtcggctccttccgcatgcgccatatgccggaggtaccagtgcgcatccgcattggtctgcactcgggcccgtgcgtggccggtgtggtgggcctcaccatgcctcggtactgcctgtttggggacacggtcaacactgcctcacgaatggagtccactggactgccttatcgcatccatgtaaacatgagcactgttcggattcttcgggctctggaccaaggcttccagatggaatgccgaggccgcacagagctgaagggcaagggtgttgaggacacgtactggcttgtgggcagagtcggcttcaacaagcccattcccaaaccacctgacctgcaaccaggggccagcaaccatggcatcagcctgcaggagattcccccagagagacgcaagaagctagagaaagccaggccaggccagtttactgggaagtgaagctctactggggacaggattattctgcaaggcccttcctgaagttgctgtgatatgggggactaaggcccaaggcttctgtccaattctgcctccaaggattctgagccaggagtctgctgcaaaccagctctgtgaccctggaaagttctg

SEQ ID NO: 365 - DNA, 3737 bp, Rattus norvegicus
taaaggtttacaatgcctcacaattatttactctttcaatggaatttgtcaacagactggagtccttggtgggattatgacagcccaaaagatgggtgcattggagtagctgtgcctgagatctgcatgttcaggctgtccactggagatgattgaatggtgatttacatggcactcagaaacaccactgttcatgtccagagggcagagtaatcctccagtatctcatcactaacttgctgaagggcagcaaggctatgttcctcggaccctggcctttttctcgccttctgtcctggtttgccatttccagcagactgtcaggacagcatggcctcacttcctccaagttcctgagatacttgtgcctcctggccctattacctctcatatggtgggggcaagcactcccctacaagataggggtcataggtccctggacatgtgatccgttcttttccaaggccctgcctgaggttgctgccgctttagcaattgaacgaatcagccgggacatgtcatttgacagaagttactccttcgaatatgtgattcttaacgaagattgccagacttcaaaggccctcaccagttttatttcccaccagcagatggcctcaggatttgttgggcctgccaaccctggctactgtgaggcagcctcactcctgggaaacagctgggacaaagggattttctcttgggcttgtgtgaatcatgaattagataacaaacatagctacccgactttttctcggacacttccttctcctatccgggtgcttgtaaccgtcatgaagtatttccagtgggctcatgctggggtcatttcctcagatgaagacatttgggtgcatacagccaatcaagtctcaagtgctcttcggagccacggcctacctgtaggggtcgtcctgacctcgggacaagacagccgtagcattcagaaagctctgcagcagattcgccaggcagacagaattcgcataatcatcatgtgtatgcattcagccttgattgggggagagactcagacacacttcttggaattggctcatgatctgaaaatgacggatgggacttacgtctttgtcccctatgatgtactgctctacagtttaccttataagcacagcccctaccaggtcctgaggaacaatcaaaagctccgggaagcctatgatgctgtgttgactattacagtggagtcccatgaaaagaccttctatgaagcctttacagaagcagcagccggtggagagattcctgagaagcttgactcacaccaagtttcaccgttgtttggaaccatctacaattcaatttactttatcgcacaagccatgagtaatgctctgaaagaaaatggacaggctagcgctgccagcctgactcggcattccagaaacatgcagttctatggattcaaccagttgataaggacagactcaaatggaaatggaatttctgaatacgtaatcctggacaccaatgggaaagaatgggaactccgtggcacctacactgtggacatggaaactgaactgctaaggttcagagggacccccattcatttcccaggtggcaggcctactagcgcagatgcaaaatgctggtttgcacaagggaagatctgccaaggaggtattgaccctgccttagccatgatggtctgctttgctttgcttctagccttgctgtctatcaatggatttgcttactttatcaggcgacgtataaataaaatccagttgattaaaggacccaacagaatcctgctgactttggaagatgtgacatttattaacccccactttggcagtaagagaggaagccgtgccagtgtaagcttccagattatctcagaagttcaaagtgggaggtctccaaggctgtcattttcttcaggtagtttaactccagctacttatgagaactccaacatagcaatctaccagggtgactgggtatggctgaaaaagttccctcctggagattttggggacattaagtctatcaaatcaagtgcaagtgatgtgtttgaaatgatgaaggacctgcggcatgaaaatgtcaaccctttattgggcttcttctatgattcggggatgtttgccatcgtgtcagaattttgttctcgaaggagcctagaagacatacttacacaagacgatgtgaaacttgattggatgttcaaatcatcactgctgcttgacctcatcaagggaatgaaatacttacaccacagagaatttattcatgggaggctaaagtctcggaactgtgtggtagacggacgttttgtactaaaagtgacagattatggctttaataacattttagaaatgctgagactctctgaagaggaaccttctgaagaagagctgctgtggacggcccctgaactgttaagagcccctgggggtatcaggttaggttcatttgcaggagacgtctatagctttgccatcatcatgcaagaagtgatggtccggggtgctcctttctgcatgatggatctgtctgccaaagaagtcatagacagacttaaaatgcctccccctgtgtatagaccagtggtttctcctgagtttgcccctccagagtgtctccagctgatgaagcaatgctgggccgaggctgcagaacagcgaccaacttttgatgaaatatttaaccagtttaaaactttcaacaaagggaaaaaaactaatattattgattctatgctccggatgttggagcagtattctagcaacttggaagatttgatccgggaacggactgaagaactggaaattgaaaaacagaaaacggaaaagcttctaacacagatgctaccaccatcagttgctgaatccctcaaaaagggctgtacagtggaacctgagggatttgacttggtcaccttgtacttcagtgacattgtgggcttcaccaccatctcagccatgagtgagcccattgaagtggtggaccttctgaatgacctgtacacactctttgatgccatcattggcagtcatgatgtctataaggtagagaccattggagatgcctatatggtggcctcaggcctcccaaagaggaacggcagtaggcatgcagctgagattgcaaacatgtccctggatattctgagctctgtgggtacctttaagatgcgacacatgccagaggtgccagtccggattcgaataggtctgcacacagggcctgttgttgctggagtggtgggccttaccatgcctagatattgcttgtttggtgatactgtgaatacagcttctcgaatggaatcaacggggctaccataccgaattcatgtcagtctcagcacagtaacaattcttcggactctgagtgaaggctatgaagtagagcttcgtggaagaacagagctcaagggtaaaggcacagaggagaccttctggcttgttggaaaaaagggtttcaccaaacctcttcctgtacccccaccagtgggcaaagatgggcaagtgggtcatggcttgcaaccagcggagattgcagcattccaaagaagaaaagcagaaaggcagttggtgcgaaacaagccataagatggaaagaactccagcatttgaatctcctcttgacaaagcaacgctgaagctcattacagatcaaggatattcttcttcttgagcaagatattagtgaatgattgttcttctgaggttgcctaatgtccagggatgggtcaagcctagtgt

SEQ ID NO: 366 - DNA, 4142 bp, Rattus norvegicus
cgccgcaccgcgcgcaccgcgccatgggggccgcgtccggccagcgggggcggtggccgttgtcaccgccgctcttgatgctgtcgctgctgctgctgctgctgctgccgccgtcgcccgccccggcgcttgaccctggattgcagccgggcaacttttccgcggacgaggcaggggcgcagctcttcgctgacagctataactcgagtgccgaggtggtgatgttccagagcaccgcagccagctgggcgcacgacaccaacatcacggaggagaatgcgcggctccaggaggaagcggccctgatcaaccaggagtttgcagaggtctggggcaagaaggccaaggagctgtatgagtccatctggcagaacttcactgaccaaaagctgcgaaggatcatcggatccgtacagaccctaggacctgccaacctgcccctgacccagcggctgcagtacaactctctgctaagcaacatgagcagaatctactccaccggcaaggtctgcttccccaacaagactgccacctgctggtccctggacccagagctcaccaacatcctggcttcctcacgaaactatgccaaggtgctgtttgcctgggaaggctggcatgatgctgtgggtatcccactgaagcccctctatcaggactttactgccctcagtaatgaagcctacagacaagatggcttctcagacacaggagcctactggcgctcctggtatgagtccccctcctttgaagagagtttggagcatctctaccaccaagtcgagcccctctacctgaacctccatgcctttgtccgtcgcgcactgcaccgccgctatggggacaaatacatcaatctcagaggtcctattcccgctcatctgctgggagacatgtgggcgcagagctgggagaacatttacgacatggtagtgcctttcccggacaaacccaacctcgatgtcaccagtacaatggtacagaagggctggaatgccacgcacatgttccgggtcgcagaggaattctttacctcgctggggctctcccccatgcctccagagttctgggcggagtcgatgctggagaaaccagctgatggacgggaggtggtgtgccatgcctctgcgtgggacttctacaacaggaaggacttcaggattaagcagtgcacgcgggtcacgatggaccagctgtccacagtacaccacgagatgggccacgtgcagtactatctccagtacaaggacctgcacgtctctctgcgtcgaggtgccaaccctggcttccacgaggccatcggggatgtactcgctctctctgtctctaccccagcacatctgcacaaaattggcctgctagaccgtgttgccaatgacatagaaagtgacatcaattacttgctaaagatggccctagagaaaattgccttcttgccctttggttacctggtggaccagtggcgctggggggtcttcagtggacgtaccccaccctctcgctacaactacgactggtggtatcttcgaaccaagtatcaggggatctgcccaccagttgctcggaatgaaacccattttgacgctggggccaagtttcacatcccaagcgtgacaccatacatcaggtactttgtgagtttcgtgctacagttccagttccatcaagcgctgtgcaaggaggcaggccaccagggtccactacaccagtgtgacatctaccagtccaccaaggcaggggccaagctccaacaggtgctgcaggctggctgctccaggccctggcaggaggtgctgaaggacctggtgggttcagatgcgctggatgccagtgcgctaatggagtacttccaaccagtaagccagtggctgcaggagcagaatcagcggaatggcgaggtcctaggctggccggagtatcagtggcgtccaccgttaccagacaactatccagagggaattgacctagagactgatgaagccaaggctaacaggttcgtggaggagtatgaccggacagccaaggtgttgtggaacgaatacgcagaggccaactggcattataacaccaacattaccatagagggcagcaagatcctgcttcagaaaaacaaggaagtgtccaaccataccttgaaatatggcacctgggccaagacatttgacgtgagcaacttccagaactctaccatcaagcggatcataaagaaggttcagaacgtggaccgggcagtgctgcctcccaacgagttagaagagtacaaccagatcctgctagacatggagacgacttacagtgtagccaatgtttgctacacaaatggcacttgtctgtcactggagcctgatctgacaaatataatggccacgtcccggaaatacgaagaattgctttgggtgtggaagagctggcgagacaaggtggggagagccatccttccctttttcccaaagtacgtggacttctccaacaagatcgccaagctcaacggctactctgatgcaggggattcctggagatcctcatatgagtccgacgacttggagcaagacctggaaaaactataccaggagctgcagccgctctacctgaacctgcatgcctatgtgcgccgctccctgcaccgccattatgggtctgagtacatcaacctggatggtcccattcctgctcacctgctagggaacatgtgggcacagacttggtccaacatctatgacttggtggcacccttcccttccgcccccagtatagatgccacggaggccatgataaagcagggatggacacccagaaggatatttaaggaagctgacaatttttttacctccctggggctgttacctgtgccccctgagttctggaacaagtcaatgttagagaagccaaccgatgggagggaggtggtgtgccatgcctcagcctgggacttctacaacggcaaggacttcaggatcaagcagtgtacctctgtgaacatggaggaattggtgatagcccaccacgaaatgggccacatccagtatttcatgcagtacaaagacttgcctgtgacctttcgggagggcgccaaccccggttttcatgaggctattggagatgttttggctctgtctgtgtctacacccaagcatctacacagtctcaacctgctcagcagtgagggcagtggctacgagcatgacatcaactttctaatgaagatggcccttgacaagatcgccttcatccccttcagctacctcattgaccagtggcgctggagggtctttgacggaagcatcaccaaggagaactacaaccaggagtggtggagtctcagactgaagtaccagggtctctgccctccagtgcctagatcccaaggtgactttgacccagggtccaagttccacgttcctgcgaatgtgccatacatcaggtactttatcagcttcatcatccagttccagttccacgaggcactatgtcgcgcagccgggcacaccggccccctgtacaagtgtgatatctaccaatccaaggaagcagggaagctgctggcagatgccatgaagttgggctacagtaagcagtggccagaagccatgaagataatcacaggccaacctaacatgtcagcctctgccattatgaattacttcaagccactgactgaatggctcgtcacagagaacaggagacatggagagacactgggctggccggagtacacctggacaccaaacacggctcgtgcagaaggctccctcccagagtccagtcgcgtcaacttcctgggtatgtacctggaaccacagcaggcccgtgtgggccagtgggtgctgctcttcctaggcgtcgccctgctggtggccaccgtgggtctcgcccaccgactctacaacatccataaccatcacagcctccgccggccccaccgtgggccccagtttgggtccgaggtggagctcagacactcctgaggtgaccctgccgtcaaggccaacagaggagtgtcccattaaaaaaaaattagatgggggacatggtgtttgagtggaacatacccaagctgggccttcttcctttgctgttcccatccactctgccccccagcccagcccccattctctagatacccagcatctaacctggaattc

SEQ ID NO: 367 - DNA, 351 bp, Rattus norvegicus
atggcggcggcgctgaccttccgccgtctgttggctctccctagggctgcccggggtttcggggtgcgagtgtcgctgagcggggagaagatcacgcataccggccaggtgtctgatggaaaagactacagggggattcgttttgtagatcgtcagaaagaggtgaatgagaactttgccattgatttgatagcacaacaacctgtgaatgaggtggaccgtcgtatcatagcctgtgatggagggggtggagccttgggccaccccaaggtgtatataaacctggacaaagaaacaaaaacgggtacgtgtgcctactgcggcctgcagttcaagcagcagcatcactag

SEQ ID NO: 368 - DNA, 3237 bp, Rattus norvegicus
gtctacgcgctgccccgaacggcggtcggtggcggcggcggtggcgacggtttcctggcggtcgcgcgctgctctggtgagcggcgggtgacggaaggacctgggctctcactccagacacaccgctctttctgaagcaaacactcgttttgaagatgtttaacaaatcatttggaaccccctttggtggtacagggggctttggtacaacgtcaacatttggacaaaatactggctttggtactactagtggaggagcatttggaacatctgcatttggttctagcagtaatactggaggcttatttggtaattcacagaccaaaccaggaggactgtttggtaccagttcacttagccagccagcaacctccacaagcactggttttgggtttggcacatcaacaggaacatcaaatagtttgtttggaactgcaaatacagggaccagtcttttctcatcccagaacaatgcatttgcacaaaataaaccaactggatttgggaattttggaaccagtactagcagtggaggactctttggaactacaaataccacctctaatccttttggtaacacatctggctccctctttgggccaagtagttttacagcagcacctacaggaactaccatcaaatttaatcctcccactggtacagatactatggtcaaagctggagttagcactaacatcagcaccaagcatcagtgtattactgccatgaaagaatatgaaagcaagtcattagaggagcttcgtttggaggactatcaggctaaccggaaaggcccacagaaccaagtgggggcaggtaccacaactggcttatttgggtcttctccagcgacttccagtgcaacaggactcttcagctcttccaccactaattcagccttttcatatggtcagaacaaaactgcctttggaactagcacaactggatttgggacaaatccaggtggcctctttggccaacagaatcaacagactaccagtctcttcagcaaaccatttggccaggctacaaccaccccaaatactggcttttcctttggtaataccagcacccttggacaaccaagcaccaatactatgggcctatttggtgtaacccaagcctcacagccaggaggtctttttgggaccgctacaaacaccagcactgggacagcatttgggacaggaacaggtctctttgggcagcccaatactggatttggtgcagttggttcgacgctgtttggcaataacaagcttacaacttttggaaccagcacaaccagtgctccctcatttggtacaaccagtggcgggctcttcggtaacaaaccaaccctgactttaggaaccaatacaaacacttccaattttggttttggcacaaataacagtgggagtagtatttttggaagtaagccagcagccgggactctgggaacaggacttggtacaggatttggaacagctcttggtgctggacaggcatctttgtttggaaacaaccaacctaagattggagggcctcttggtacaggagcctttggggcccctggatttaatacttcgactgccattttgggctttggcgccccccaggccccagtagctttgacagatccaaatgcttctgctgcccagcaggctgttctccagcagcacctcaatagtctaacatactcaccctttggagactcccctctcttccggaatcctatgtcagatcctaagaagaaagaagagagactgaaaccaaccaatccagcggctcagaaagctcttacaacccctactcattataaacttacacctcgccctgccaccagagtcagaccaaaggctttgcaaacaacaggtacagccaaatcacatctctttgatgggctggatgacgatgaaccatctctagccaacggagcgtttatgccgaaaaagagcatcaagaagttggttttgaaaaatcttaacaatagcaatctcttttctcctgttaatcatgattcagaagatctagcttcaccctctgagtatccagaaaatggagagagattcagcttcctgagcaaacctgttgatgagaaccatcagcaggatggagatgatgactctcttgtatcacgattttacactaatcctattgccaaacctattccacaaactccagagagtgctggaaacaaaaataacagtagcagcaatgtggaagacactttcattgctttgaacatgcgtgctgctttgcgaaatggactggaaggaagcagtgaagaaacgtctttccatgatgagtcattgcaagatgaccgagacgagatagaaaacagtgctttccaaatccatccagcaggcattgttctcacaaaagttggttattatactattccatctatggatgaccttgctaaaattaccaatgagaaaggagaatgcattgtttctgacttcaccattggccgtaaagggtatggctcaatctattttgaaggagatgtgaatttgacaaatctaaatctggatgacattgtgcatatccggaggaaagaagttattgtctatgtagatgataaccaaaagccacctgtgggtgaaggactaaataggaaggctgaagttactttggatggagtttggccaacagataaaacatcccggtgtttaataaagagtccagatcgacttgctgatatcaattatgaggggagattagaagcagtctcaagaaagcaaggggcccaattcaaggagtatcggcctgaaactggttcttgggtgtttaaggtttcccatttttctaagtatggccttcaggattctgatgaagaggaggaggaacacccacccaaaactacttcaaagaagctgaagactgcccctttgccccctgcaggccaggcaaccactttccagatgactcttaatggcaaacctgcaccccccacctcaggtagagaagggcagagaatgtgaatgcggccgtgataaagaagtcagaggtcattcagcttttcagctgttcagcccttggaactaagtgcaagggaggggcacagtgctgcaggctgttatttttttactcaagatttaaagaattctcttgctgtttggatcgttcttctacaaattgtaacttaatttctctcatttggacttgtaatgttttgatcagtgatcagcttgagatagcattttgcttgtgtggggttgatgcaaagtaaatcctacttttattgatttc

SEQ ID NO: 369 - DNA, 14746 bp, Rattus norvegicus
ttacctgagtcccgccagcactggaggaggatcgcgctctgcttggggatatgctgaagatccaagggaggcaaagttggtacttcgagcccggatcctaacaaatatccaatcggcgtgggaattacccaactgccggggactgtaaggaagaacaccgaggaccgggctactgtggtggccaagagttgaacaatggggagacacttggccttgcttctgcttctgctcttcttcctccagcattttggagatggtgatggaagccaaagacttgaaccgaccccttccctccagtttacacacgtccagtacaatgtcactgtgcacgaaaactcggccgcaaagacctatgtcggccaccctagaaaaatgggcatctacatcttagacccctcgtgggaaataaggtacaaaatcatctcaggagacaacgaaaacctattcaaagcggaagagtatgttctcggagacttttgctttctaaggataagaaccaagggagggaatactgccatcctgaaccgagaagtgagagaccattacacactggtaatcaaagcagttgaaaaagtcacagatgccgaggcccgagccaaggtcagggtgcaagtgctggatacaaacgacttacggccgttgttctcacccacgtcctacagcgtttctctgccggaaaacacagccataaggaccagtatcgcaagagtcagtgccacggatgcggacattggaaccaacggcgaattttactacagctttaaagacagaacggacatgtttgccatccacccaaccagtggtgtggttgttttgactggcaggcttgatgtcctggagacccagcgctatgagctggagatcttggctgtggaccggggaatgaagctgtacggtagcagtggggtcagcagtctggccaagctgacggttcacgtggagcaggctaacgagtgtgcacccgggataaccgccgtgacgttatcaccatctgagctggacaaggacccaacgtacgccattatcactgtggaggactgcgatcagggtgccaacggggagatagcatctttgagcattgtggctggcgacctccttcagcagtttaaaacggtgaggtctttcccagggagtaaagcattcaaagtgaaagccgtcgggggcgtcgactgggacagccatccttatggctacaacctgacagtgcaggctaaagacaaaggaactcctccgcagttttcccctgtgaaagtcattcacgtcatttctcctcagttcagagctggcccggtcaagtttgaaatggatgtttacagagctgagatcagtgagtttgcccctccacatacacccgtggtcctggtcaaggctattcctagttattcccatttgaggtacgtttttaaaagcactcctggaaaacccaaattcggtttaaatcacaacacgggtctcatttccattttagaaccaattaaaaggcagcacacatcccattttgagcttgaggtgacaacaagtgacagacgagcctccaccaaagtcgtggtcaaagttgtaggtacaaacagcaaccccccggagtttacacagacctcgtacaaagcatcctttgatgagaatgcacccgtcggtaccccggtcatgagggtgagcgcggttgaccctgacgagggggagaatggctacgtgacttacagtattgcaaacttaaatcacgtgccatttgtcatcgaccactttacgggtgctgtgagtacctctgagaatctggactatgaactgatgcctcgagtctacacgctgaggattcgtgcttccgactggggcttaccgtaccgccgggaagttgaagtccttgccacaattactctgaataacctgaatgacaacacccccctgtttgagaagacaaactgtgaagggacaattccccgagacctgggtgtaggggagcagataaccacggtttctgccattgacgctgatgagctgcagttggtccggtaccagattgaagctggaaatgagttggatttgtttggcttaaaccccagctctggtgtgctgtcattgaagcactcgctcatggacggcttgggtgcaaaggtttcctttcacagcttgagaatcacagctacagacggagaaaattttgccacaccattatatatcaacctaacggtggctgccagtcgcaagccagtaaacttgcggtgtgaggagaccggtgttgccaaaatgctggcagagaaactcctgcaggcgaataaattacaccatcagggggacgcggaggatattttctttgattctcactccgtcaacgcccatgccccacagtttaggggttctcttccaacaggaattgaggtaaaggaggacctcccagtgggcgccagtatactattcatgaatgctactgaccttgactctggcttcaatgggaaactggtctatgctatctctggagggaatgatgacagttgctttactgttgacatggaaacaggaatgctgaaagtcctctctccacttgaccgagaagtaacggacaaatacacactgaacattaccgtgtatgaccttggtataccccagagggctgcctggcgccttctggatgtcaccgtcctggatgccaatgacaacgcgcccgagtttttacaggagagctattttgtcgaagtgagcgaagacaaggagataaacagtgaaatcatccaggtagaggccaccgataaagacctgggccccagcggacacgtgacatacgccatcctcacggacacagagaagtttgcgatcgacagggtgaccggtgtggtgaaaattatccagcctttggatcgtgaagtgcagcgtgtacattacctgaagatcgaggccagggaccaagccacagaggaaccctggctgtcctccactgtgcttctgaaagtgtcactcgatgatgttaatgacaacccacctaggttcattccacccagttactccgtgaaggttcgagaagacctaccggaaggaaccatcatcatgtggttagaagcccatgaccctgatgtaggtcagtccagtcaggtgagatacagcctcctggaccacggagaaggccacttcgatgtggataaactcagcggggcagtgagaattgtccagcagctggactttgagaagaagcaactgtataatctcaccgtgagggccaaagacaaagggaagccggcgtctctgtcttccactggctacgtggaagtggaggtcgtggacgtgaatgagaacttacacgcgccagtgttctccagcttcgtggagaagggcacagtgaaagaagacgtccctatgggctcatcagtaatgaccgtgtcagctcacgatgaggacaccgggagagatggagagatccggtattccatcagagatggctctggtgttggtgttttcaggatagatgaagaaacaggtgtcatagagacctcagatcgactggaccgagagtcgacttcccactactggctcaccgtctacgccacagatcagggtgtggtgcctctgtcatccttcatagaggtctacatagaggttgaggatgtcaatgacaacgcaccacagacatcagagcctgtgtattatcctgaaataatggagaattcacccaaggatgtatctgtggtccagattgaggcatttgacccggattccagctccagtgacaagctgacgtacagaattacaagtggaaatccccaagggttcttctcaatacaccctaaaacaggtctcatcacaaccacatcgaggaagctggaccgagagcagcaggatgaacacattctggaagttactgtgacagacaatggtgtacctcccagatccaccattgccagggtcattgtgaaaatcctggatgagaacgacaacaggcctcagttccttcagaagttttataaaatcaggctcccggagcgagaaaaagctgatggagaccggagcgcgaagcgcgagcctctctaccgagtcatagccgcagataaggatgaagggcccaatgccgagctctcctacagcatcgaggaagggaacgagcacggccggttttccattgaacccaagacaggagtggtctcatccaaaaagttctctgcggctggagaatacgacattctttctattaaggcaattgacaatgggcgcccccagaagtcatcgaccaccagactccatattgaatggatctccaaacccaagccgtccttggagccgatttcgtttgaggaatcggttttctcgtttactgtaatggagagtgatccggtggctcacatgatcggcgtgatctccgttgagcctcctggcatgcctctgtggtttgacatcatcgggggcaactatgacagtcactttgatgtggacaagggcactggaaccatcattgtggccaagccccttgacgcagagcagaagtccagctataacctcacagtggaggcgacagacgggacctccactatcctcacccaggtactcatcaaagtaatagataccaatgaccaccgccctcagttttctacctcgaaatacgaagtctctgttcccgaagacacagagccagaaacagagattctgcaaatcagcgccgtagacagggacgagaaaaacaaactgatctacaccctccagagcagcatagatccagcaagtctcaagaaattccgcctcgatcctgcaacaggcgctctctacacatctgagaagctcgatcacgaagccattcaccagcacgtcctcacagtcatggtccgggatcaggatgtccctgtgaaacgcaactttgccagaatcattgtgaatgtcagtgacatgaatgaccactctccgtggttcaccagttcgtcctatgaagggcgggtttatgagtcggcagccgtgggctcggtcgtgctacaggttacagctctggacagagacaaagggagaaatgctgaagtgctctactccatcgagtcaggaaacattggaaattcctttacaatcgaccccatcttgggctctataaaaactgccagagaattggatcgaagtcaccaagtagactatgatttaatggtaaaagctacagacaaaggggagccaccaatgagcgaaatgacctccgtgcggatctctgtcaccgtcgccgacaatgcctctcctaagttcacatccaaggagtactcggctgagattagtgaagccatcaggattgggagttttgttggaatggtctctgctcacagtcagtcatcagtgatgtatgaagtaaaagatggaaatataggcgatgcatttaatatcaatccacattcaggaagcatcgtcactcagagagccttggattttgagacactgcccatttatacattgacagtacaagggaccaacatggccggcttgtccaccaatacaacggtggtagtgcacatacaggatgagaatgacaaccctccagctttcacacgggcggaatattcaggattcattagtgaatcagcctcagtcaacagcgtggtgctaacggataagaatgttccgctcgtgatccgagccaccgacgctgatcgggaatccaatgctctgctcgtctatcaaattgtcgagccatctgtgcacaactattttgccattgatcccaccaccggtgccatccataccgtactgagtctggactatgaagagacacgtgtctttcacttcaccgtccaagtgcatgacatggggacgcctcgtctgtttgctgagtatgcagcaaatgtgaccgtgcatgtgattgacatcaatgactgcccccctgtcttctctaagtcactgtacgaagcatccctcctattgccgacgtacaaaggcgtgaacgtcatcacagtgaatgccacagatgccgactccagggcgttctcccagttaatatactccatcaccaaaggcaacattggggagaagttctccatggaccacaagactggcaccatagcaattcagaacacaacccagttacggagccgctatgagctgaccgtccgcgcctccgatggccggtttacaagcgtggcctccgtgagaatcaacgtgaaggaaagcagagagagtcctctcaagtttacccaagatgcctactctgcggtggtgaaggagaactccaccgaagccaaaaccttagctgtcattaccgcgatagggaacccgattaacgagcctttgttttaccgtatcctcaacccagaccgcagatttaaaatcagccacacctcaggcgtgttgtcaaccactgggataccatttgatcgggagcaacaggagacgtttgttgtggtggtagaggtgactaaagaacgggagccgtcggccgtggcccacgttgtggtgaaggtcaccgtggaagaccagaatgataatgcacccgtgtttgtcaaccttccctactatgctgtggtgaaggtggatgctgaggtgggccatgtcatccgccacgtcactgccattgacagagacagtggcagaaacggtgacgttcactactaccttaaggagcatcatgaccactttgagattggaccctctggtgacatttctctgaaaaagcaatttgagcacgacaccttgaataaagaataccttgtcacagtggttgcgaaggacggggggaacccagctttctccgcagaagttctagttcccatcaccgtcatgaacaaagccatgcccgtgtttgaaaaggctttctacagtgcagagattcccgagaacgtccagacgcacagcccagtggtccacgtccaagccaacagcccagaagggttgaaagtgttctacagtatcacagacggggacccttttagtcagtttactatcaacttcaacactggggtgataaacgtcatcgcaccgctggactttgagtcccacccagcctataagctaagcatacgggccactgactccctgactggcgcccacgctgaagtgtttgttgacatcgtagtagaagacatcaatgacaaccctcccgtgtttgtgcaacagtcttactcgacaaccctgtctgaagcatctgtcatcggagcgcctatccttcaagttagagccaccgactctgactcggaaccaaatagagggatttcctaccagctgattggaaatcacagcaaaagccacgatcactttcacatagatagtcacactgggctgatttcactggtgagggctttggattacgaacagttccagcagcacaagctgctcgtaagggctgttgatggaggaatgccgccactgagcagcgatgtggtcgtcactgtggatgtcaccgacctcaacgataacccgcctctgtttgaacaacaggtttacgaagctaggatcagtgagcacgctgcccacgggcattttgtgatgtgcgtaaaggcctgtgatgcagatcgctcagacctagacaggctggagtactccattctgtccggcaatgatcacaagagctttgtcattgacggggagacaggaatcatcacgctctccaacccgcgccgccacaccttgaagccgttctatagtctcaacgtttctgtgtctgatggggttttccgaagctcggctcgggtgaatgtcaccgtgatgggagggaatttgcacagccctgtctttcaccagaatgagtatgaggtagagctggctgaaaacgcccccttgcacaccctggtggtccaagtgaaggctactgacagagattccggtatctacggccacctgacttaccaccttgtaaatgactttgccaaagacaggttttacgtgaacgacggagggcaggtcttcactctggagagacttgatcgagaggctccagcagagaaagtgatctcagtccgtttaatggctaaggatgctggggggaaggtcgccttctgcactgtcaacgtcatcctcacggacgacaatgacaacgcaccacagtttcgctcaaccaagtacgaggtgaacgtggggtccagcgccgccaaagggacgtcggtcgtcaaggtcttcgcgagtgatgccgatgaggggtcgaatgctgacgtcacctacgccatcgaggcagattcggaaagtgtcgaggagaacttggaaatcaaccaactgaccggcctcattactacaaaggaaagcttaataggtttagagaatgaattcttcactttcttcgttagagctgtggataacgggtctccgcccaaagagtctgttgttcctgtctatgttaaaatacttcccccggaagtgcagcttcctaggttctcagagcccttttatacctattccatttcagaagacatgcctattggcacagagattgacctcatccgggtagagcatagcgggactgttctctacaccctggtcaaaggcaatactcccgagagtaacagggacgagttctttgtgattgaccggcagagtgggagactgaagctggagaagagccttgaccacgagaccactaagtggtatcagttttccatcctggccaggtgtactctggatgactacgaggtggtggcttctatagatgtcagtatccaggtgaaagacgctaatgataacagcccagttttggagtccaatccatacgaggcatttattgtcgaaaacctgccagcagggagtagggtcatccaggtcagagcatctgacctagactcaggagtcaacggccaagtcatgtacagtctagatcagtcccaagatgcagacatcatcgagtcttttgccattaacatggaaacaggctggattacaaccctcaaggagcttgaccatgaagagagagccagttaccagattaaagtggttgcctcagaccatggtgaaaaggtgcagctgtcttccaccgccattgtggatgtcaccgtcactgacgtcaacgacagcccgcctcgattcacagctgagatttataaagggacagtgagtgaggatgaccccccagggggtgtgatcgccatcttgagcaccactgacgccgactctgaagagattaaccgacaagtgtcgtacttcataacaggaggggatgcattgggacagtttgctgtggaaaatatgcagaatgactggagggtgtacgtgaagaaacctctcgacagggaacaaaaggacagttaccttctgaccgtcactgcaacagatgggaccttctcttccaaagctagagttgaagtcaaggttctcgatgccaatgataacagtccagtgtgtgagaggaccgcatattctgatgccattcccgaagacgctcttccggggaagctggtcatgcaggtctctgccacagatgcagatatccggtccaacgcggagatcacttacactttatttggctcaggtgcagaaaagtttaaactgaatccagacacaggtgaactgagaacattagccctccttgatcgtgaggagcaagcagtttatcatcttctggtcaaggccacagacggagggggcagatcctgtcaggcaactattgtgctcacgttagaagatgtaaatgacaacacccccgagttcaccgcggatccatacgccatcacggtatttgaaaacacagagcctgggacaccgttgaccagagtgcaggccaccgatgcagacgcagggttgaatcggaagatttcctactcactgcttgactctgctgacgggcagttctccattaacgagcagtccggaattcttcagttggaaaagcatttggacagggaactacaggcagtctatactctcactttgaaagcagcggaccaaggattgccaaggaaattgacagccactggcacggtggttgtgtctgttttggatataaatgacaacccacctgtgtttgagtaccgtgaatatggtgccaccgtgtcagaggacattgtcatcgggaccgaagttctccaggtgtacgcagccagtcgggatatcgaggcgaatgcagaaatcacatacgcaatcataagtgggaacgaacacggaaaattcagcatcgattctaagacaggggccatatttatcattgagaacctggattatgaaagctcccatggctattacctgactgtggaagccactgatggaggcacgccctcgttgagtgacgtggcgaccgtgaacatcaacatcacagatattaacgataacagcccagtgttcagccaggacagctacaccacagtggtcagcgaagacgcggccctggagcagcccgtcattacaattatggctgatgatgctgatggcccttcaaacagccacatcctctactccattatagagggtaaccaaggaagtccattcacaatcgaccctgtcagaggagaaatcaaagtaacgaagcccctagaccgcgaaacgatctcaggttatacgctcacggtgcaggctgccgacaacggcaatccacccagagtcaacaccaccacagtgaacatcgatgtctccgatgtcaacgacaatgctcccctcttctccagagacaactacagtgtcatcatccaggaaaacaagcccgtgggtttcagcgtcctgaagctagtagtgacagacaaggactcgtcccacaacggcccccctttctcctttgctattgtgagtggaaatgatgacaacatgtttgaggtgaaccagcacggggtcctcctgacagcggcaacagtcaagaggaaagtgaaggaccattaccttctgcacgttaaggtggctgacaatggaaagcctcagctgtcttcgttgacacacattgacatcagggttattgaggagagcatccaccctcctgccattttgccactggagattttcatcactgcttctggagaggaatactcaggcggggtcataggaaagatccatgccacagaccaggatgtgtatgacaccttgacgtacagtctggatccccacatggatggcctgttctctgtttccagcacggggggtaaactgattgcacacagaaagctggatataggccagtaccttcttaatgtcagcgtgacagacgggaagtttacaacggtggctgacatcaccgtgcacatccagcaagtgacccaggagatgctgaaccacaccatcgctatccgatttgcaaatctcaccccggaagagtttgtcggcgactactggcgcaacttccagcgagctttacgcaacatcctgggcatccggaagaacgacatacagattgtcagcttgcagccctccgaaccccactcccaccttgacgtcttactctttgtagagaaatcagggggcacccagatctcaacgaaacaacttctgcacaagatcaattcttccgtcacggacatcgaggaaatcattggcgtgaggatactggatgtgttccagaaactctgtgcagggctggattgcccgtggaaattctgtgatgagaaggtttctgtggatgaaaacattatgtcaactcatagcacagccagactgagttttgtgactccccggcaccatagaacagccgtgtgtctctgcaaagatgggacatgcccgcctgtccaccaagggtgcgaagataacccctgtcctgcaggatccgaatgtgtcgctgatccccgagaagagaagtacagctgtgtgtgtcctggtggcgggttcgccaaatgtccagggagttcatccataacttttaccggcagcagctttgtgaaatatcgtctgatggaaaatgaaaaccgactggagatgaagttgaccatgcgcctgagaacctactcttcccacgcggttgtgatgtacgctcgaggaactgactacagtatcctggagattcatactgggagactgcagtacaaatttgactgtggaagtggccctgggatcgtctctgttcagagcattcaagtcaacgatgggcagtggcatgcagtgtccctggaagtggaggggaattatgcaaaattggttctagatgaagtccacactgcctcgggcacagccccaggagctctgaaaaccctcaacctggataactacgtaatttttggtggccacctccgccagcaagggacaaaacatggacgaaacacccaggtggccaatggtttcaggggctgcatggactctatttatttgaatgggcaggagctacctttgaacaacaaaccaagagcctatgcacacatcgaagaatgggtggacctagctcatgggtgcttgttaactgccaccgaagactgttccagcaacccttgtcagaatggaggcgtctgcaatccctcgcccactggaggttattactgcaagtgcagtgcattgcacgcagggacgtactgtgaggtgagcgtcaacccgtgctcctccaacccctgcctctacggaggaacgtgcatggtagacaacggaggttttgtttgccagtgcagggggctgtacactggccagagatgtcagcttagtccgtactgcaaagatgaaccctgtaaaaatggtggaacgtgttttgacagtttggatggtgctgtctgtcagtgtgactcaggctttaggggagaaagatgtcagagtgacattgacgagtgtgctgggaacccctgtcggaacggggccctttgcgagaacacgcatggctcctatcactgtaactgcagccaggagtacagagggaagcactgtgaggatgccactcccaaccactacgtgtccaccccgtggaacatcggactggccgaaggaatcggaattattgtgtttatagccgggatattcttactggtggtggtgtttgtcctctgccgaaagatgatcagtcggaagaagaaacaccaggcggaacctgaagacaagcgtttggggccaaccacggctttcttacagagaccttactttgattccaagccgagcaagaacatttactctgacatcccgccccaggtgcccgtgcgtcccatttcctacactccgagcattcccagtgactctagaaacaatctggaccggaactcgtttgaaggctcggcaatcccagagcacccagaattcagcacttttaaccccgagtctatgcacggacatcggaaagccgtggctgtgtgcagcgtggctccaaacttgcctcccccacccccttccaactctccctcagacagcgactccattcagaagcccagctgggacttcgactacgacgctaaagtggtggatcttgacccttgtctttccaagaagcccctggaggaaaaaccctctcagccatacagtgcccgggagagcctgtccgaggtgcagtcccttagctccttccagtcagagtcctgtgatgacaatgggtaccactgggatacatcagactggatgcccagtgttcctctgccagacatacaagagttccccaattacgaggttatcgatgagcacacgcccctctactcagctgatccaaatgccatcgacactgactattaccctgggggttatgacattgaaagtgactttccacccccaccagaggacttccctgcacccgatgaactgccaccattgcctccagaattcagcgaccagttcgagtccatacacccacccagagacatgcccgcagcaggtagcttggggtcttcctccaggaatcgtcagaggttcaacctgaatcagtacctgcccaatttctaccccgtcgatatgtctgaacctcagaaacaaggcgctggtgagaacagtacctgtagagaaccctacactccctaccctccagggtatcaaagaaacttcgaggcgcccaccatagaaaacatgcccatgtctgtgtacacctctacggcttcctgctccgatgtgtcagcgtgctgcgaagtggagtctgaggtcatgatgagtgactacgagagcggggacgacggccactttgaagaggtgaccattcccccgctagattcccagcagcatacggaagtgtgacgctcaagctcctccccaaagtgcctggactctcatgaacctagagatgctatctgatatccacgttgttcttctgcggcggtcttgcctgcttctcgatgagctgcggtaggcacggttgcacggagtcacatgcctctcgacgtgttagccatttccagtgtcctaactgactgtgattgaccgggttttcatcccctgtccatcctgagcatctttgcgtatttagatttgtctctgttaaaaaatgatgaaacagaaatcggtcctgtcgtcttgttagcatgattcatgtatttatatagattcgattattttaattttgttttctttgtgtaaattttatgtacagatttgattttcccccccatagttttttactaggtttttcaggacgcatcgcgtgtttgttttctgctggatctgtgtggtgttagcgtcgtcgcctagcaccgattttctgatgtaaacagggtttcataccgttctttcccactgaagtatgacatttcattgacacatttcggtccagtgtagctgtacatatggggtgaggacaacctgttactggacatgtcttaaatgggttgctgtattcggattataaacatttttcattattggaaagtgtaaaggggaccttctgcatacctgtttagaacccaaaccaccacgacacggtttttatagtgtctgtatatttgtgatgcaatggtctcgtaaaggtttttactgaaaactatcattagccagcctttcttactgacaataaattattaat

SEQ ID NO: 370 - DNA, 690 bp, Rattus norvegicus
acaagaatgagaggcttcatcttcactcgacacagtcaaaccacagccaatccttcatgccctgaaggaacacagccactctacagtgggttttcccttcttttcgtacaaggaaatgagcacgcccatggacaagaccttggtactctgggcagctgcttacagcgattcaccacaatgccattcttattctgtaacgtcgataacgtgtgtaactttgcatcacgaaatgattattcatactggctgtcgacaccagccccgatgcccatggacatggccccaattactggcagagcccttgagccctacgttagcagatgtaccgtctgcgaaggtcctgcaatggctatagctgttcacagtcaaaccactgctatccccccatgtccccagggctgggtttctctctggaaaggtttttctttcgttatgtttacaagtgcaggctctgagggtgctggacaagctcttgcctcgcccggctcctgcctggaggaattccgagccagtccatttatagaatgccatggacgagggacctgcaactactactcaaactcttacagcttctggctggcttcactaaatccagaaagaatgttcagaaaacctattccatcgactgtgaaagctggagacttggagaaaatcataagccgctgtcaggtgtgcatgaagaaaagacac

SEQ ID NO: 371 - DNA, 413 bp, Rattus norvegicus
gctgaggagcctgaccggcccggcccggcggcttatggtgccgcgggctcaggtccactcgaagccgccgcgggagcagctcggggtcctggatatcaccattgggctcacttcctgcttcgtgtgttgtcttctacctgcgggctgggtcctgtcacacctggaaagctacaagaagcgggagtgaagggagcgtcttccctcatcctttgactagaccactcttgccagcccaccttgatcatgtttcctgcattcctggctggcttaccctgggatcatgttattcaattccagtcacctcttctgcaatcatgacctctcgatgtctccatggtgacaactgggaccacatatattggttctgcttgatggggtccccctttgtaacaataaagtctatttaaaccttg

SEQ ID NO: 372 - DNA, 1547 bp, Rattus norvegicus
atggcaccccgcacgctgctcctgctgctggcggccgccctggccccgacccagacccaggcgggctcacactcgctgcggtatttcgacatcgctgtgtcccggcccggcctcggggagccccggttcattatcgtcggctacgtggacgacagggaggtcatgcgcttcgacagcgacgcggagaatccgaggatgaagcctcgggcgcggtggatggagcgggaggggccggagtattgggagcggcagacacggaaagtcaaggaaaaggagcagattttccgagacaacctgaggaccctgctccgctactacaaccagagcgagggcggctctcacaccgtccagagattgtctggctgtgacgtggggtcggacgggagcctcctccgcgggtataatcagcacgcctacgatggccgcgattacatcgccctgaacgaagacctgaaaacgtggacggcggcggacacagcggcgcagatcaccaaaaacaagtgggaacgggatggtgaggcagagagacgcagggcctacctggagggcgagtgtgtggagtggctccgcagttacctggcacccaggaaggagacgctgctgcgctcagatcccccaaaggcacatgtgacccttcaccccagacctgaaggtgatgtcaccctgaggtgctgggccctgggcttctaccctgctgacatcaccctgacctggcagttgaatggggaggacctgacccaggacatggagtttgtggagaccaggcctgcaggggatggaaccttccagaagtgggcatctgtggtggtgccttctggggaggagcagaattacacatgccttgtggagcatgaggggctccctaagccgcttacccagagatgggagccttctccatccaccaacaccaacatgggaatcgatgttacttctgttgttcttggagctgtggctgtctttgtagttttggccatcattggagctgtggtgtgtgttgtgaggaggaggaggaggaggagaaacacaggtgggaaaggagactacacccctgctcgaggcagggacagctcccagagctctgatgtgtctctcccagattgtaaagcatgaagacagctgcctggagtggactgagtgacagacgatgtgttcaggtctctcctgtgacacccagagccctcggttctctttagacaccagtgtctgatgctccctgtgattctatggcttctgtgtgaaggactgtggagcccagcccgccctgcacaccaggaccctgtccctgcactgcctgtgttcccttccacattcagccttgctggtccagcctggggttcaggggtggggacatctgcatcctgtccccctgtgctaccctgagctgcagcccctcacttccaccctgagaataagaatctgagtgtgaacttgattgttcacatccttgacacaagtgtggatggctttttaaattactggatggaatacttaggggttttttgttttggggttttgctttgttttgttttgtttttgaaaaaaataat

SEQ ID NO: 373 - DNA, 1519 bp, Rattus norvegicus
tgcaactgaaagcattcttagcttgccagtggcccccactgcctgcctgcctgcggaactctctagaccatagattcctcctccactctagcaagagaagatgctgtctaatttgaggatcctgctcaacaaggcagctcttagaaaggctcacacttccatggttcgaaattttcggtatgggaagccagtccagagtcaagtacagctgaaaggccgtgacctcctcaccctgaagaacttcacaggagaggagattcagtacatgctatggctctctgcagatctgaaattcaggatcaaacagaaaggagaatacttgcctttattgcaagggaaatccttagggatgatttttgagaaaagaagtactcgaacaagactgtccacagaaacaggcttcgctcttctgggaggacatccttcttttcttaccacacaagacattcacttgggcgtgaatgaaagtctcacagacacagctcgtgtgttatctagcatgacagatgcagtgttagctcgagtgtataaacaatcagatctggacatcctggctaaggaagcaaccatcccaattgtcaacggactgtcagacctgtatcatcctatccagatcctggctgattaccttacactccaggaacactatggctctctcaaaggtctcaccctcagctggataggagatgggaacaatatcctgcactccatcatgatgagtgctgcaaaattcgggatgcaccttcaagcagctactccaaagggttatgagccagatcctaatatagtcaagctagcagagcagtatgccaaggagaatggtaccaggttgtcaatgacaaatgatccactggaagcagcacgtggaggcaatgtattaattacagatacttggataagcatgggacaagaggatgagaagaaaaagcgtcttcaagctttccaaggttaccaggttacaatgaagactgctaaagtggctgcgtctgactggacgtttttacactgcttgcctagaaagccagaagaagtagatgatgaagtgttttattctccgcggtcattagtgttcccagaggcagaaaatagaaagtggacaatcatggctgtcatggtatccctgctgacagactactcacctgtgctccagaagccaaagttctgatgcctgcaagaggacgaaaaacccaaaagacaaaaaaatctgttctttagcagcagaataagtcagtttatgtagaaaagagaagaattgaaattgtaaacacatccctagtgcgtgatataattatgtaattgctttgctattgtgagaattgcttaaagcttttagtttaagtgctgggcattttattatcctgcttgacttgacttaagcactctcttcaattcacaacttctgaatgatatttgggtttcatattaattatcatacacatttccttccactaagcattaaacactatgcttacaatgcataccatctaagtcattaaatgtaatccatgcttattacctt

SEQ ID NO: 374 - DNA, 2073 bp, Rattus norvegicus
gtctctgtgtggtctcgtcatcagcacagctgggcctacacgcaagcaaccatgtctaagggacctgcggttggcattgatcttggcaccacctactcctgtgtgggtgtcttccagcatggaaaggtggaaataattgccaatgaccagggtaaccgcaccacgccgagctatgttgctttcaccgacacagaacgattaattggggatgcggccaagaatcaggttgcaatgaaccccaccaacacagtttttgatgccaaacgtctgatcggacgtaggttcgatgatgctgttgttcagtctgacatgaagcactggcccttcatggtggtgaacgatgcaggcaggcccaaggtccaagtcgaatacaaaggggagacaaaaagtttctatcctgaggaagtgtcttcaatggttctgacaaaaatgaaggaaattgcagaagcttaccttggaaagactgttaccaatgccgtggtcaccgtgccagcttacttcaatgactctcagcgacaggcaacaaaagatgctggaactattgctggcctcaacgtacttcgaattatcaatgagccaactgctgctgctattgcctatggcttagataagaaggtcggggctgaaaggaatgtgctcatttttgacttgggaggtggcacttttgatgtgtcaatcctcactatcgaggatggaatttttgaagtcaaatcaacagctggagacacccacttgggcggagaagactttgacaaccgaatggtcaaccatttcattgctgagtttaagcgaaagcacaagaaggacatcagtgagaacaagagagctgtcaggcgtctccgcactgcctgtgagcgggccaagcgcaccctctcctccagcacccaagccagtattgagattgattctctctatgagggaattgacttctacacctccattacccgtgctcgatttgaggagttgaatgctgacctgttccgtggcacactggaccctgtagagaaggcccttcgagatgccaaactagacaagtcacagatccatgatattgtcctggtgggtggttctaccagaatccccaagatccagaaacttctgcaagacttcttcaatggaaaagagctgaataagagcattaaccccgatgaagctgttgcctatggtgcagctgtccaggcagccattctatctggagacaagtctgagaatgttcaggatttgctgctcttggatgtcactcctctttcccttgggattgaaactgctggtggagtcatgactgtcctcatcaagcgcaataccaccattcccaccaagcagacccagactttcaccacctactctgacaaccagccaggtgtactcatccaggtgtatgaaggtgaaagggccatgaccaaggacaacaacctgcttgggaagtttgagctcacaggcatacctccagcaccccgtggggttcctcagattgaggttacttttgacattgatgccaatggcatcctcaatgtttctgctgtagataagagcacaggaaaggagaacaagatcaccatcaccaatgacaagggccgcttgagtaaggaggatattgagcgcatggtccaagaagctgagaagtacaaagctgaggatgagaagcagagagataaggtttcctctaagaactcgctggagtcttatgctttcaacatgaaagcaactgttgaggatgagaaacttcaaggcaagatcaatgatgaagacaaacagaagattcttgacaagtgcaacgaaatcatcagctggctggataagaaccagactgcggagaaggaagaatttgagcatcagcagaaagaactggagaaggtctgcaaccctatcatcaccaagctgtaccagagtgctggtggcatgcctggaggaatgcctggtggcttccctggtggaggagctcctccatctggtggtgcttcttcaggccccaccattgaagaggtcgattaagtcaaagtagagggtatagcattgttccacagggacccaaaacaagtaacatggaataataaaactatttaaattggcacc

SEQ ID NO: 375 - DNA, 1696 bp, Rattus norvegicus
cgctgaacgctctcatcatcctaccgtcatgtctaagtcagagtcccccaaggaaccggaacagctgcggaagctcttcattggagggctgagcttcgaaacaaccgacgagagtctgaggagccattttgagcaatggggaacactcaccgactgtgtggtaatgagagatccaaacaccaaaagatccagaggctttgggtttgtcacatatgccactgtggaggaagtggatgctgccatgaatgcaagaccacacaaagtggatggaagagttgtggaacctaagagagctgtgtcaagagaagattctcagagaccaggtgcccacttaactgtgaagaagatctttgttggcggtattaaagaagacactgaagaacatcacctacgagattattttgagcagtatgggaaaattgaagtgattgaaattatgactgacagaggcagtggaaaaaagaggggatttgcgtttgtcacctttgatgaccatgactctgtggataagattgttattcagaaataccatactgtgaatggccacaactgtgaagtaagaaaggctctgtgcaaacaagagatggctagtgcttcatccagccagagaggtcgaagtggttccggaaactttggtggtggtcgtggaggtggtttcggtggcaatgacaattttggtcgaggagggaacttcagtggtcgtggtggctttggtggcagccgtggtggtggtggatatggtggcagtggggatggctataatggatttggcaatgatggaagcaattttggaggtggtggaagctacaatgattttggcaattacaacaaccagtcatcaaattttggaccgatgaaaggaggaaactttggaggcaggagctctggcccttatggtggtggaggccagtactttgctaaaccacgaaaccaaggtggctatggaggttccagcagcagcagtagctatggcagtggcaggaggttctaattacagccaggaaacaaagcttagcaggagagccagagaagtgacagggaagctacaggttacaacagatttgtgaactcagccaagcacagtggtggcagggcctagctgctacaaagaagacatgttttagacaatactcatgtgtgtgggcaaaaactccaggactgtatctgtgactaattgtataacaggttattttagtttctgttctgtggaaagtgtaaagcattccaacgaagggttttactgtagacctttttcacccatgctgttgattgctaaatgtaaaagtctgatcatgacgctgaataaatgtgtcttttttttttttttttaatgtgctgtgtaaagttagtctactctgaagccatcttggtaaacttccccaacagtgtgaagttagaattccttcagggtggtgccaaattccatttggaatttatttatggttgcttgggtggagaagccattgtcttcaaaaaccttggtgttgctaaactgccagttactgttgtaacttaatgagtttcaccatttaaagggtcatccaagcaagatcacaatttggttataaaatggttgttggacacctatgaagagaaaattgaataacggtctcagataaaataagagatgggaatgaagcttgtgtatcatccattatcatgtgtactcaataaacgatttaattctcttgaatgg

SEQ ID NO: 376 - DNA, 1018 bp, Rattus norvegicus
ttgacattttctttcaggtgaccaaactttttgctgaggctgtgcagaaagctcgtactgtggactccaagagtctgttccactacaggcagtacagcgctggaaaggcagcatagagcaatatgctggtctagtgaattcatccttcagtcagcaggagccacactgtaccaaagggactggtcccagcctatcgccagaaatggatgttgttgccaaaccttatttttggtttccctgttcttagtagtctgtatctttaaccactgaattgttgtcagtcactgtttcaaaaccatcaggttcttcccaagtctcttgttcttcacaaggaatccaaccattcatacattatcttttgtagaccgacttgtaacatttcatggtgctggttaacaacaattgaagtaaaaatagttgctgccctatctcctaaattctatactctaaacatactctcatttttaaagtagcttctgccacacccagagtccactaactggacagattaccatgaaatttcattaaaataaaatgtggatttaatttatgaatggcattatgatgtttgtgtattggtattttttgggaaatgattctcatttacatagccaacctagaaatagcatttcttcttcccataatatacaatgtgagattggatttctttgatagatccttgcttgaggttttggaggatgtcagcagatgtcagagaacacagaagtggttatattcttgatattctttttagattttaacataagccaagtgaaacatatagactcatgatatttgcctttggctaaaattttggaacactttagaagttcctgttccttttgtatgatggattctgagtctcacttgcattctgcattccacacatattacgcatatggcctccatcccttgacatgctagatgtttttctttcaaggtagcttttgttgcttttaagtgttttgtttattactgtgccttaattgtgaacttttaaataaaatactattgagtg

SEQ ID NO: 377 - DNA, 456 bp, Rattus norvegicus
tggtatccctttggctttcacatccaaacagaatggaaacgatccccaaactgatggccgctgttgttctgttgactgtgtgtttggaaggctgctccagccagcactggtcctatgggttgcgccctggggggaagagaaatactgaacacttggttgattctttccaagagatgggcaaggaggaggatcaaatggcagaaccccagaacttcgaatgcactgtccactggccccgttcacctcttagggatctgcgaggagctctggaacgtctgattgaagaggaagctgggcagaagaagatgtaatgcactggcccagaaggatccacaacatccgagtgtgacattgacgctgagatccatgacctgttacagctctgtaattgtgtgggcttccgcatttctatacccagcagcgtagatttcataataaagtaatgtgttgtggatc

SEQ ID NO: 378 - DNA, 823 bp, Rattus norvegicus
atctcagagatgcatctgtctttgtctcaccaatggtcctcctggacagtcctcttgctgctggtgtccaacctgcttctgtgggagaacacagcctctgctatgagagctaaactgttgaatgtccacaactacacatcctatggagacacttggaatcaggcaattaagatatcccaggacatgaatcagtacatttcagatctgtccactcacgttaaaatattttatgcccaaggccgagggtttgaacgccggaccaccagatgccacacttcttccctctctagtccagaaaacaaggagcaagcccaacagttccaactggaagtactactggggttgtcacacagcctattgcaagcctggctcaaccctctgcaccatctgtgggctgaaatgtgtgacaggctaggatccactcctcctaccctctacaaggccttgatgcttaaggaatcaaacataaagctcctggatgccataaagaatattgccaaaaagggtaattttgaaatcaaccaaaaggcgaactacactgcctggtctgaattgggattcttgcaatcgcccaatagagacactagatactttgccttttataacctgtttcactgcctcaagaaggactcaaataacgtggaaatgtatctgaagcttctgaagtgccgactgatccgaagcaagtgctaagaacgcataacatccttaatatccttctgccccagtgatggttcttaaattgcacttgtacaaagtacctgagtctaatggctctgttctttaaaaacaaaaaataaaaaactgaacaaagtttcccaag

SEQ ID NO: 379 - DNA, 2571 bp, Rattus norvegicus
ggggcgggccaatggcggcggtcctataaaaaggcagctccgcgcgctctcttcctaagaacacaagaatcccttgtggagtgtcggtttaggttgcagggtcttaagtgagtcagggcgcggaggtccggcgggagacgcatagtcacagaacgtccattctccgtttcacagcccgcacagcttgagcctcgagcgcagcgcggccatggagcccagcagcaagaaggtgacgggccgccttatgttggccgtgggaggggcagtgctcggatccctgcagttcggctataacaccggtgtcatcaacgccccccagaaggtaattgaggagttctacaatcaaacatggaaccaccgctatggagagtccatcccatccaccacactcaccacactctggtctctctccgtggccatcttctctgtcgggggcatgattggttccttctctgtgggcctctttgttaatcgctttggcaggcggaactccatgctgatgatgaacctgttggcctttgtgtctgccgtgcttatgggtttctccaaactgggcaagtcctttgagatgctgatcctgggccgcttcatcattggagtgtactgtggcctgaccaccggctttgtgcccatgtatgtgggggaggtgtcacccacagctcttcgtggagccctgggcaccctgcaccagctgggcatcgtcgttgggatccttattgcccaggtgttcggcttagactccatcatgggcaatgcagacttgtggcctctactgctcagtgtcatcttcatcccagccctgctacagtgtatcctgttgcccttctgccctgagagcccccgcttcctgctcatcaatcgtaacgaggagaaccgggccaagagtgtgctgaaaaagcttcgagggacagccgatgtgacccgagacctgcaggagatgaaagaagagggtcggcagatgatgcgggagaagaaggtcaccatcttggagctgttccgctcacccgcctaccgccagcccatcctcatcgccgtggtgctgcagctgtcccagcagctgtcgggcatcaatgctgtgttctactactcaacgagcatcttcgagaaggcaggtgtgcagcagcctgtgtatgccaccatcggctcgggtatcgtcaacacggccttcactgtggtgtcgctgttcgtcgtggagcgagctggccgtcggaccctgcatctcattggtctggctggcatggcgggctgtgctgtgctcatgaccatcgccctggccctgctggagcagctgccctggatgtcctatctgagtatcgtggccatctttggctttgtggccttctttgaagtaggccctggtcctattccatggttcattgtggccgagctgttcagccaggggccccgacctgctgctgttgctgtggctggcttctctaactggacctcaaacttcatcgtgggcatgtgcttccaatatgtggagcaactgtgtggcccctacgtcttcatcatcttcacggtgctgctggtactcttcttcatcttcacctacttcaaagttcctgagaccaaaggccggaccttcgatgagatcgcttccggcttccggcaggggggtgccagccagagcgacaagacacctgaggagctcttccaccctctgggggctgactcccaagtgtgaggagcccacagccagtcccgcctgctcccagcagccccgaggatctctctggagcacaggcagctagatgagacctcttccaaactgacagatctcgggcgagccgggcctgggcacctttcttcagtcagcaatgaagtccagaagaatattcaggactttgatggctccagaatttttaatgaaagcaagactgttgctcagatctattcagataagcagcagattttataatttttttattactgattttgttattatttttttttttatcagccactctcctatctccacactgtagtcttcaccttgattggcctagtgcctgagggtggagaccacgccctgtccagacacatgccttctttgccaagctaatctgtagggctggacctttggccaaggacacacgaatactgaacaatggctaggaggctttaccgcaggaggcggtagctgccacccacttctgcaggcctggatctcgacaccataggggtccaggctccatttaggattcgcccattcctgtctcttccaactcaaccaaccactcgattaatctttccttgcctgagaccagttgaaagcactggagtgcagggaggagagggaagggccaggctgggctgccaggttcaggtctcctgtgcactgagggccagacaaacaccatgagaaggacctcggaggctgagaacttactgctgaagacacggacactcctgccctgctgtgtatagatggaagatatttatatattttttggttgtctattaaatacagacactaagttatagtatatatctggacaaacccacttgtaaatacaccaacaaactcctgtaactttacctaagcagatataaatggctggtttttag

SEQ ID NO: 380 - DNA, 1457 bp, Rattus norvegicus
gcaagcctcagcatccttggctttgcagtctcctgcggcaagcattctcgaggaagccagccaaggaccaactacaaccatgagactggcagtggtttgcctttgcctgttcggccttgcctcctgtctcccggtgaaagtggctgagtttggcagctcagaggagaaggcgcattacagcaaacactcagatgctgtagccacttggctgaagcctgacccatctcagaagcagaatcttctagccccacagaattctgtgtcctctgaagaaacggatgactttaagcaagaaactcttccaagcaactccaatgaaagccatgaccacatggacgatgatgacgacgacgatgacgacggagaccatgcagagagcgaggattctgtgaactcggatgaatctgacgaatctcaccattccgatgaatctgatgagtccttcactgccagcacacaagcagacgttttgactccaatcgcccccacagtcgatgtccctgacggccgaggtgatagcttggcttacggactgaggtcaaagtccaggagtttccctgtttctgatgaacagtatcccgatgccacagatgaggacctcacctcccgcatgaagagccaggagtccgatgaggctatcaaggtcatcccagttgcccagcgtctgagcgtgccctctgatcaggacagcaacgggaagaccagccatgagtcaagtcagctggatgaaccaagcgtggaaacacacagcctggagcagtccaaggagtataagcagagggccagccacgagagcactgagcagtcggatgcgatcgatagtgccgagaagccggatgcaatcgatagtgcagagcggtcggatgctatcgacagtcaggcgagttccaaagccagcctggaacatcagagccacgagtttcacagccatgaggacaagctagtcctagaccctaagagtaaggaagatgataggtatctgaaattccgcatttctcatgaattagagagttcatcttctgaggtcaattaaagaagaggcaaaaccacagttccttactttgctttaaataaaacaaaaagtaaattccaacaagcaggaatactaactgcttgtttctcagttcagtggatacatgtatgtggagaaagaaatagatagtgttttgggccctgagcttagttcgttgtttcatgcagacaccactgtaacctagaagtttcagcatttcgcttctgttctttctgtgcaagaaatgcaaatggccactgcattttaatgattgctattcttttatgaataaaatgtatgtagaggcaggcaaacttacaggaacagcaaaattaaaagagaaactataatagtctgtgtcactataatcttttggttttataattagtgtatattttgttgtgattatttttgttggtgtgaataaatcttgtatcttgaatgt

SEQ ID NO: 381 - DNA, 1731 bp, Rattus norvegicus
ggcatcagtaaggagggtctccatggatctggtcactttcctggtacttactctctcctctctcattctcctctcactctggagacagagctctaggagaaggaagctccctcctggccccactcctctcccaataattggtaatttcctccagatagatgtgaagaacatcagccaatccttaaccaagttttcaaaaacctatggccctgtgttcactctgtatttgggctcacagcccactgtcatattgcatggatatgaagcaataaaggaagctctgattgataacggggagaagttttctggtagaggaagctatccaatgaatgaaaatgttactaaaggttttggcattgtttttagcaatggaaacagatggaaagagatgagacgattcacaatcatgaactttcggaatttgggaattggaaaaaggaacattgaggaccgtgttcaagaggaagcacagtgcctagtggaagaactgaggaaaacaaaaggctcaccctgtgacccctccttgatcctgaactgtgctccatgcaatgtcatctgctccattactttccagaatcattttgattataaagataaggaaatgcttacgttcatggaaaaagtgaatgagaatctcaagattatgagctccccatggatgcaggtctgcaatagttttccttcactcattgactattttcctggaactcatcacaaaatagcaaaaaatattaattatatgaaaagctatttgttgaagaaaatagaagaacaccaggaatcattggatgttacaaaccctcgtgattttgttgattattacctgattaaacaaaaacaggcaaacaacatcgaacaatcagaatattcacatgaaaatctgacatgcagtatcatggatctcattggtgcagggacagagacaatgagcacaacattgagatatgctctcctgcttctgatgaagtacccacatgtcacagctaaagtccaggaagagattgaccgtgtgattggcagacatcgcagcccctgcatgcaggatagaaaacacatgccctacactgatgccatgattcatgaggtacagagattcattaactttgtcccgaccaacctgccccatgcagtgacctgtgacattaaattcaggaactacctcatcccgaagggaacaaaagtgttaacatcactgacatcagtgctgcatgacagcaaggagttccccaacccagagatgtttgaccctggccactttctagatgagaatggaaactttaagaaaagtgactactttttgcctttctcagcaggaaaacgagcttgtgttggagagggcctggcccgcatgcagttgtttctattcttgacaaccattttacagaactttaacctgaaatctctggttcacccaaaggacattgatacgatgccagttctgaatggttttgcctctctgccacccacttaccagctctgcttcattccttcctgaatagatcaggcattttggcttctactgtgttgccttctgcaatccccttcaggtttttatccagtcccttccctctatcatccatcctgactcttgtcttaagatccagaaagcacatgcagtttctggagttatagcacaaatccacttgtattatctctttcatataacaatttatgatcccttgtgtcattgtgtatccattcctgagttaaaataaagcttcactataaaat

SEQ ID NO: 382 - DNA, 1365 bp, Rattus norvegicus
ggccattacggccggggactgcaggagggaagaagtctacgagaatccatccatttcctgcccacagcgaaggacagcatgagcacagctggaaaagtaatcaaatgcaaagcggccgtgctatgggagcctcacaagcccttcaccatcgaggacatagaagtcgcaccccccaaggcccatgaagttcgcattaagatggtggccaccggagtctgccgctcagacgatcacgcggttagtggatccctgttcacgcctcttcctgcagttctaggccacgagggagctggcattgttgagagcattggagaaggggtgacttgtgtgaaaccaggtgataaagtcatcccgctgttctctccccagtgtggaaaatgcaggatctgcaagcacccggaaagcaacctctgttgccaaactaagaatctgacacagcctaagggagctttgctggacggcaccagcaggttctcctgcaggggaaagcccattcaccacttcatcagcaccagcaccttctcccagtacactgtggtagatgacatagcggtggccaaaatcgatgcggctgcaccgctggacaaagtctgcctcatcggctgtggcttctcgactggctatggctctgccgtccaagtcgccaaggtgaccccaggctccacctgtgccgtgtttggcctggaaggtgttggtctgtctgtcgtcattggctgtaaaacagcaggagcagccaagatcattgccgtggacatcaacaaagacaagtttgcgaaggccaaagagttaggtgccactgactgtatcaaccctcaagactacaccaaacccatccaggaagttctccaggagatgactgatggaggggtggacttttcatttgaagtcattggccgtcttgataccatgacttctgccctgttaagctgccattcagcatgcggtgtaagcgtcattgtcggggtgcctcccagtgcccaaagcctctccgttaaccccatgtcgctgctgctgggacgcacctggaaaggagcaatattcggcgggtttaagagtaaagatgccgtccccaaacttgtcgctgacttcatggctaagaagtttccgttggagccgctgattactcatgttttaccttttgaaaagataaatgaagcatttgacctgctccgtgctggaaagagtatccgtaccgtcctgacgttctgagaacacatgaatgccttcccggtttctgactcctccgcctaccgaatcaagcgccagccacatcacaaccttaaccttgctcttcagagacacacagccaataaagcacctgtgcaagctttccgtagaaaaaaaaaaaaaaaaaaaaaaaaaaaa

SEQ ID NO: 383 - DNA, 1346 bp, Rattus norvegicus
gaattccgggagacaaccttgtcaagcacctaattgtgccatccgtgcgatgccagccagctccatccaccttacaggagtgaagtcagcgttcatatacgctgtgtggtctggcagctgagatagtgtttcccaaagggactgtggaatgttacctcagcaggcattcatttcgcgtttggaaaatcgtctccaaatgaactttctttccgtgctgggtctgcagaacatttcagaagcggagctagcaatctgcttcaactttttttcccccggtgcttgcagcaggagatgcctgaagggagctgctgcgtggtggtctgaaacatagttcaaggaatagaggtcaactgcctagagcggtgcaggcagggcacaggctggctttgtactctgagtctcaaggtatttcccagtgcctgagccagggggaaggtggggggaggaagggaaggagctgccacttggatcgctattctgggtagccaagacagatagccatacaatggaaattagtggcttcaacttgggggaaaggatggactctaacttcgagctgtgcagttcgcccattgtttgaatggacaaaaggcagtttacccaggctcctagcatacctgcctgggtgtccaaatgtaactagatgctttcacaaaccccacccacaaaacaacacatgttcttaagtcctgggctttgttttcacttcggcctcataatacccactctgacctgctgtgtaaacgacccgggacgtaccaaaatgagcgcacctccaataaagatacacatcatgtcgtcttcacatctcttctacctggcactctgcttgctcacctttaccagctcggccacagccggaccagagaccctttgcggggctgagctggtggacgctcttcagttcgtgtgtggaccaaggggcttttacttcaacaagcccacaggctatggctccagcattcggagggcaccacagacgggcattgtggatgagtgttgcttccggagctgtgatctgaggaggctggagatgtactgtgtccgctgcaagcctacaaagtcagctcgttccatccgggcccagcgccacactgacatgcccaagactcagaaggaagtacacttgaagaacacaagtagaggaagtgcaggaaacaagacctacagaatgtaggaggagcctcccgaggaacagaaaatgccacgtcaccgcaagatcctttgctgcttgagcaacctgcaaaacatcggaacacctgccaaatatcaataatgagttcaataccatttcagagatgggcatttccctcaatgaaatacacaagtaaacattcccggaattc

SEQ ID NO: 384 - DNA, 630 bp, Rattus norvegicus
gagctcctcgcagatccctaagaggtgaacggggccagtggacagtgcattcgaagttctggggttctgccatttgatcctcctccttgcccatctggagataaagaatgagattctcaaacatgaagggcgcaacccataggaccagtgctggctggagcagccttccaaacacacagtcaacagaacaacagcggccatcagtttggggatcgtttccattctaagggacatcaagacacagagggaagaatactttggaaagaagccagcacccggaccactgactccacagaaactgcagacacacagcttgttcagagacaaggaaatgggggcatctgcctgtcctaagctttacggacactggggacaggcacctgtactagattctggcatattcagtactttttttgtggtaatgtagtccactttttgtttatttgggttacccagaacccataattcatcccttaccaaattgaaactttcgccatgcattacccattataaattagttctcaactctgtcattcatgaagttagagctaggccatctgctctgaaaaaagaagtacctactgggtatctctggctaataaaaggttgcatgtatttgctaccctttgg

SEQ ID NO: 385 - DNA, 1124 bp, Rattus norvegicus
tctccgctcgtcctccggtagcagccgccagcacagtgtccgctgctgggcggggtgtcggcggatcggtcggttggtttcggcttcggtgtcgctgcgtttgagttgggccgtcatggctgagttggatccatttggcgctcccgccggtgcgcccggtggccccgcgctcgggaacggggtggcgggcgccggcgaggaagacccggccgcggccttcttggcgcagcaggagagtgagattgcgggcatagagaacgacgaggccttcgccatcctagacggcggcgcccccgggccgcaggcacacggcgagccgccggggggtcctgatgcggttgatggagtgatgaatggcgaatactaccaggagagcaatggtccaacagacagttacgcagccatttcagaagtggatcggttgcagtcagagcctgaaagtatccgtaagtggagagaagagcagacagagcgcctggaagccctcgatgccaattctcggaagcaggaagcagagtggaaagaaaaggcagtgaaggagctggaagagtggtacgcaaggcaggatgagcagctacagaagacaaaagccagcaacagggtggcagatgaagctttctacaaacaacccttcgctgacgtgattggttatgtcacaaacataaaccatccttgctacagcctagaacaggcagcagaagaagcctttgtaaacgacattgacgagtcatccccaggcactgagtgggagcgggtggcccgcctgtgtgactttaaccccaagtccagcaaacaggccaaagatgtctctcgcatgcgctcagtcctcatctccctgaagcaggcgcccctggtgcattgaagagccaccctgtggaaacactacgtctccgatcttaatcctactcagtgaagctgttcacgcaattggattaattatgccgagttcttttggaccaaaccttttgtctttagagttgatcattgtttgtgattgcatgtttccttcaactgtgttctccctggcattcagagaagagagaggaagaggaagggaggggagctcccaacagtagcctcaacctgtgcttttgtgcattattctgagaataaatttctgtttc

SEQ ID NO: 386 - DNA, 1383 bp, Rattus norvegicus
atgaacacctcagtgccccctgctgtcagtcccaacatcactgtcttggcaccaggaaagggtccctggcaggtggccttcatcgggatcaccacaggcctcctgtctctagctacagtgacaggcaacctactggtactcatctccttcaaggtcaacaccgagctcaagacagtcaacaactacttcctgctgagcctggcctgtgctgacctcatcattggcaccttctccatgaacctctataccacgtacctgctcatgggccactgggctctgggcacactggcctgtgacctctggctggccctggactatgtggccagcaacgcctctgtcatgaatcttctgctcatcagctttgaccgttacttctcggtgacccgacccctgagctaccgagccaagcgcactccccgaagggcagctctgatgattggcctagcatggctggtttccttcgttctctgggccccagccatcctcttctggcaatacctagttggggagcggacagtgctggctgggcagtgctacatccagttcctctcccaacccatcatcacttttggcacagccatggccgccttctacctccctgtcacggtcatgtgtacactgtactggcgcatctaccgggagacagaaaaccgagcccgggagctggccgccctgcagggctctgagacaccaggcaaaggtggtggcagcagcagcagctcagagaggtcacagccaggggctgaaggctcacccgagtcgcctccaggccgctgctgccgctgttgccgggcacccaggctcctgcaggcctacagctggaaggaagaagaagaggaggatgaaggctccatggagtccctcacatcctccgaaggtgaggagcctggctcagaagtggtgatcaagatgcccatggtagattctgaagcacaggcacccaccaagcagcctcccaaaagctccccaaatacagtcaagaggcccaccaagaaaggccgagaccgaggcggcaagggccaaaaaccccgagggaaggaacagctggccaagagaaagaccttctcactggtcaaggagaagaaggcagctcggaccctgagtgccatcctgctggccttcatcctcacctggacaccatataacatcatggtgctggtatctaccttctgcaaggactgtgttcctgaaaccctgtgggagctgggctactggctatgctacgtcaacagcactgtcaaccccatgtgctatgcactgtgcaacaaagccttccgggacacgttccgcctgctgctgctctgccgctgggacaagaggcgctggcgcaagatccccaagcgccctggctctgtgcaccgcaccccctcccgccaatgctaa

SEQ ID NO: 387 - DNA, 2589 bp, Rattus norvegicus
caacttcacgcctgtcaatggcagctcagccaatcagtctgtgcgcctggtcacagcagcccacaaccacctggagacagtggagatggtgttcattgctacagtgactggctccctgagcctggtgactgttgtgggtaacatcctggtgatgctgtccatcaaggtcaacaggcagttgcagacggtcaacaactacttcctcttcagcctgggctgtgcggatctcatcataggggcattctctatgaacctctacactttgtatatcatcaagggctactggcccctgggtgccgtggtctgtgacttgtggctggccctggactatgtggtgagcaatgcctctgtcatgaaccttcttatcatcagcttcgatcgttacttctgcgtcaccaaacccctcacctatcccgcccgccgcactactaagatggcaggtctcatgatcgcagctgcctgggtcttgtcctttgtgctctgggctcctgccatcttgttctggcagtttgtggtgggcaagaggacggtgcctgataaccagtgcttcatccagttcttgtccaacccggcagtgacctttggcaccgccattgctgccttctacctgcctgtggtcatcatgacggtactgtatattcacatctcactggccagccgcagccgcgttcacaagcatcgacctgagggccccaaggagaagaaggccaagactctggctttcctcaagagccctctgatgaagccgagtatcaagaaacctccaccagggggcgcttctcgagaggaactgcgcaatgggaagctggaagaggctcctccgccagccctgcccccgcctccacgcccagtgcctgacaaggacacttccaatgagtccagctcaggcagtgccacccagaacaccaaggaacggccacccacagagctgtccaccgcagaggccaccactccagcgctgcctgcccctaccctgcagccacgaaccctcaacccagcctccaaatggtccaagattcaaattgtaacaaagcagacaggcaatgaatgtgtgacggccatcgagattgtacctgccactccagctggtatgcgcccagcagccaatgtggcccgaaagtttgccagcattgctcgcaaccaggtgcgcaagaagcggcagatggcggcccgggagcgcaaagtgactcggacaatctttgccattctgctggccttcatcctcacctggacaccctacaatgtcatggtcctggtgaacaccttttgccagagctgtatccccgagagggtgtggtccatcggctactggctctgctacgtcaacagcaccatcaaccccgcctgctatgcactctgcaatgccactttcaaaaagaccttccggcaccttttgctgtgccagtatcggaacatcggcacagccaggtagacaggcaggtgccctaggaggtgctggtgtcatgagtgtgtaccggggaaccacatggctcaccggctgtggaggagagagtaggcggccccactctgagttcgcatctgctgaagagaacaggtctcccagacaccgtgaggtaccagaggcccttcgctaggatgggagagatctctactgaagcctagaaggctcagcccagggagggtctgaactgtcaccacccggcccacatctgttaccttgcctcaggaagatgggggacaatggctggagtgggcagtggctctacaaaggccaaccatcggccgaagtgcatagagccgagcccaggagcatctcgggaggagcaaaaggagccaggcttgcaagggcggggtcccccatgcgctgtaatcggtgctttccgccttcctgcaccctcctccccctgcatgtaggctcagcccttcccctgaccccaagtcccactccagggtgagagagtgccctgctaatgttgctcagccaggctctgggtgggaaaccaagacctttggcactcccctggccagcagtcatatctggatggggcaactgggaaatcatgctaagctgagacagattccagggcactgagtcaattagtgctggatcatatggtcaaactgtcaagagcccacccccacccccaggtcacacatcaaatgagtggcagcagcgttcctctctcctctacaaggagggaggtgtggatccaagggaggaaaggtggtggtagggaccttggtgatctatacaggcctcagtgacaggtgacacaagcaagcaccctcattagtccccaaggagagcattccagactggcagtagcctggaccagaaagactcttgactaggtgaggcagagttcaaatgagtcacctgggttctcttgggtaaccccagccctgtgggtccctgggagagataacacccaaggggccctggaagacatttttgtaaatgttctgctctttccactaattgttgggagcacttcttacgtagccctccgctcccctcagtacatctttccccatcctcccacccccaacaaagctccctggcaaactccctgggaaggggcttttatatattaaaaaagaggcttttattggaaaaaaaaaaaaaaa

SEQ ID NO: 388 - DNA, 727 bp, Rattus norvegicus
agctgggactggttcctgccacctccccgagcccctgcactcttgtctctctctgtctccacagcagcgtcaccggctcccggatcctgccagccgtccagctctacaggcaccatgaggagcgccatgctgttcgcggctgtcctcgccctcagcttggcatggaccttcggggctgcgtgtgaggaacctcaggagcagggtgggaggctcagtaaggactctgatctctctctgctacctccacccctgcttcggagactctacgacagccgctccatctctctggaaggattgctgaaagtgctgagcaaggctagcgtgggaccgaaggagacatcacttccacagaaacgtgacatgcacgacttctttgtgggacttatgggcaagaggaacagccaaccagacactcccgctgatgtggttgaagagaacacccccagctttggcgtcctcaaataggccagcagtgcagaaaagcactccactctcagaccctggactgcatcataaagacagggttcctgtggcggtcccagtgcctgcgctcctgcttccctgcctgcaaggtcctcctgttggctcccttccctactctgcacagatgctgcatatgaacagcctctacccccatatcaattatggtttctgtagtgtcctgcattaaaaataccatgtctcctcctcaacaataaagggtttttacaatggagtgactgaaaag

SEQ ID NO: 389 - DNA, 494 bp, Rattus norvegicus
cgagctcgctgtgagatagctagatgcaccacaatgctctcctcctagatggtggcggtacgcaggccttggcccgttatggtcgcaatgctgcttgtcctgctcgcctgcctgggagcgctggtggacgcctaccccgctaaaccagaggctccgggcgaagatgcctccccggaggagctgagccgctactatgcttccctgcgccactacctcaacctggtcacccggcagcggtatgggaaaagagaagtccccgcagctctgttctccaaactgctcttcacagacgacagcgagaatctccccttcaggtctcggccagaaggtgtggaccagtggtgaagacgcccaaggcctcccgtgagatgtgctaactacaccgacttcacttgcatgtttggtttaagaagaggggacttcgtgtctcagacacccaggctggagggctgtgtgtgttcatgtccccgtcctcaaataaaaacatttcgcac

SEQ ID NO: 390 - DNA, 743 bp, Rattus norvegicus
ctttgcagacgccgctgtctcttttcgccgcttgctgcagacatggtcaaccccaccgtgttcttcgacatcacggctgatggcgagcccttgggtcgcgtctgcttcgagctgtttgcagacaaagttccaaagacagcagaaaactttcgtgctctgagcactggggagaaaggatttggctataagggttcctcctttcacagaattattccaggattcatgtgccagggtggtgacttcacacgccataatggcactggtggcaagtccatctacggagagaaatttgaggatgagaacttcatcctgaagcatacaggtcctggcatcttgtccatggcaaatgctggaccaaacacaaatggttcccagttttttatctgcactgccaagactgagtggctggatggcaagcatgtggtctttgggaaggtgaaagaaggcatgagcattgtggaagccatggagcgttttgggtccaggaatggcaagaccagcaagaagatcaccatctccgactgtggacaactctaatttctttgacttgcgggcattttacccatcaaaccattccttctgtagctcaggagagcacccccaccccatctgctcgcaataccctgtaatctctgctctcactgaagttctttgggttccatattttcctcattccccttcaagtctagcaggattgcaaagttaagtttatgattatgaataaaaactaaatgagaagtgtt

SEQ ID NO: 391 - DNA, 780 bp, Rattus norvegicus
atgtggctccagatcctgttcctcgtcctgtccgtgggacgaattgatgctgctcctcctggccagtctcgggttgttggaggatataaatgtgagaagaattcccaaccctggcaagtggctgtcatcaacagatacctctgcgggggtgtcctgatagaccccagctgggtgatcacggctgcccactgctatagccacaattaccatgttttgctgggccgaaacaacctatttaaagatgaaccctttgcacagtaccgggttgtcaaccaaagcttccctcaccctgactacaacccattcttcatgaagaaccacaccctatttcctggggatgaccacagcaatgacctgatgctgctgcacctcagtgagcctgcggacatcacagatggggtgaaggtcatcgatctgcccactgaggagcccaaggtggggagcacctgccttgcctcaggttggagcagtaccaaaccccttgagtgggaattccctgatgatctccagtgtgtgaacatcaatattctctctaatgagaagtgcatcaaagcccacacacagatggtgacagatgtcatgctgtgtgcaggagagttggaaggaggcaaagacacttgcaatggtgactcaggaggccccctcctctgtgatggtgtgcttcaaggcatcacgtcctggagctctgtcccatgtggcgaaaccaataggccagctatctacaccaaacttattaagttcacctcctggataaaagaagttatgaaggaaaactcctga

SEQ ID NO: 392 - DNA, 1663 bp, Rattus norvegicus
cctgggggtcgtgaagttccgagcggacgggtccacggaggttcatctggagaggtgggtcccctgcgaggtgaaaggcgccgctgcgacacacccccaccccccgcggtgcagtggttcagcccaataacttttcattcataaaaaagaccagactctgcgaggcgcgagtgagtcagaaccgcagccgccgacgcggaccctaccgaacatccagcccagggcatgtaccgagacttcggggaaccgggaccgagttccggggctggcagcgcgtacggtcgccccgcgcagccccagcaagcgcagacacagacagtccagcagcagaagttccaccttgtgccaagcatcaacgctgtcagtggcagccaggaattgcagtggatggtgcagcctcatttcctgggacccagcggctatccccgacctctgacctatccccagtacagtccccctcagccccgaccaggagtcatacgagccctagggccacctccaggggtgcgacgcaggccctgtgagcagatcagcccggaggaggaagagcgccgcagggtgagacgcgagcggaacaagctagcagctgctaagtgcagaaaccgaagaaaggaattgacagacttcctgcaggcggagaccgacaagttggaggatgagaaatcggggctgcagcgtgagatcgaagagctgcagaagcagaaggaacgccttgagctggtgctggaagcccatcgccccatctgcaaaatcccagaagaagacaagaaggacacaggtggtaccagcagcacgagtggggcgggtagcccaccgggcccctgccgcccagtgccttgtatctccctttctccaggacccgtacttgaaccggaagcactgcatacccccacgctcatgaccacaccctctctgactccttttactccgagtctggttttcacctatcctagcacaccagagccttgttcctcagcccatcgaaagagtagcagcagcagtggtgacccctcctccgaccccctaggttctcccacactcctggctttgtgaggcacccagccacaccccttgcaggtgctacccgttgtcatctcctttccctgttcatccagcaggcctggaccatacccatgccccaaaccagcaggtcttttatctctttcaagtagaacaaacatgttatgctttgatatagagccagcttgggggtccccaaagctgctcactgtttctctagagctggcctatcataatttgcatacagagaaaatatgtccctctgccagagtaagcctggcagctctgactttgtagatccccagtggtcctttgatgccttgcagaccactttcccacaccatgtcactttcttcatgttatccagcctactctaagcctagatagaaggtgccctttaactagcctagaacactaactcacacagcaccaacagccagcagcaccaggacaccctgtaggctcctcctgatcaggaggcaccaacagcttctgtgatgagctgagctgtactccctagctctgagaagcttttagctctggggtatccaagcctccacagcaagggcagctgctatttattttcctaaagagactatttttatacaaaccttccaaaatggaataaaaggcttgaagctct

SEQ ID NO: 393 - DNA, 622 bp, Rattus norvegicus
gttccccaccctccaagtacaccagacaagatttaccttcattatgcagaacctcccacaggaccatttgttgaacctccagatctcttttttctcagaactacaaagtctaagcctgtgcaggggaccccaacacagttagccaaatcacctaaagaaatggtttttcaaactccagaatataaggaagctgttctttcagctccaggtgaggatcaagatgagactccatcctcacccaatatgtcattacaatctcttgatcaggaactcaccatgtcttctcaacctcatggttggcttccccatcctccaaatacacatggcaagatttaccttcattatgcagatcctcccacaggaccctttgttgaacctccagatctgttttttctcaaaactacaaaatctaagcctgtgcaggggactgtaacacagatggacaaatcacctaagcagggttttcttccagcccatggtgaggctcaagatgagtctagatcaccacccaatatgtcattacagcctgtggatcaggaactctccctgtcttctcaacctcatggttggattacccatcctccaaatacaccaggcaagatttaccttcattatgcagaac

SEQ ID NO: 394 - DNA, 529 bp, Rattus norvegicus
ctgacccaaacgcagatggcgaaatcacctgaagagatagtttctctacgtccggaatataaggaggctattcttccagcgcaggttgagagtcaagaggagtctgtattcctacctaatatgtcattacaatctctggatcaggaactcaccctgtcttctcaacctcatggttggattccccaccatccaaatacaccagacaagatttaccttcattatgctgaacctcccacaggaccatttgttgaacctccagatctgttttttctcaaaactacaaaatctaaacctgttcagtggaccccaacacagattgacaaatcacttaaaaagatggttgctcaaagtcccgaatatgaggaggctgtttttccagctcatggtgagggtcaagatgagtctagatacgcaccaaatatatccttacagtctctggaccatgatatcaccctatcttctcaacctcatggttggattccccaccctcctaatacaccagacaagatttaccttcattatgcagaac

SEQ ID NO: 395 - DNA, 1214 bp, Rattus norvegicus
gcaaactgaaccccagcctttttagacctgtctcacccacaaaaaggtcctgccccagtgctatcatgacaaaggattatcaagatttccagcacttggacaatgagaacgaccaccatcaactccagagagggccacctcccgctccaaggctcttgcagcgactctgctctggattccgtctcttcctgctttccctgggcctcagcatcctgctgctggtggttgtctgtgtgatcacatcccaaaattcccaactccgggaagatctgcgggttctaaggcagaatttcagcaactttaccgtgagcactgaggaccaggtcaaggccctgaccacccagggagagagagtgggaagaaagatgaagttagtcgagtcacagctggaaaaacatcaggaggatctgagggaagaccactctagattgctactgcatgtaaagcagttagtgtctgacgtgcgaagcttgagctgccagatggccgcacttcggggcaatggctctgaaaggatctgctgccccatcaactgggtggagtatgaaggcagctgctactggttctccagctctgtgaagccttggacggaagctgacaagtactgccagctggagaacgcccacctggtggtggtgacttcctgggaggagcagagattcgtccagcaacacatgggccccttaaatacttggattggcctaactgaccagaacggaccctggaaatgggtggatgggacagactatgagacaggcttcaagaactggagaccagggcagccagatgactggtacggacatgggcttggagggggtgaagactgtgcccacttcaccaccgatggccactggaatgatgacgtctgcaggaggccctaccgctgggtctgtgagacagagttgggcaaggccaattaggagcctccattcccctgatttatttcctgagtgccttgagctgtgaggcttagagttgggaggtcctactcaagggtctccccatctttgggaactttcatctaggattttaaggggctggtaaagaatggtgtttgaggaatgtggtatgatgcctggtggtggtggtggtggtggttattggaacccatgacactttgtgcagtgtgcagcttactactgccaacttgtttttgagagtaaaagaaggaagataaacattcaaaaaaaaaaaaaaaaaaaaaaaaaaaaaaa

SEQ ID NO: 396 - DNA, 8399 bp, Rattus norvegicus
tactgcagaggtctctggtgcatgtgtatgtgtgtgcgtgtgtttgtgtacgtatgttctgcccctgtcaggctgcagcccttgtgaaacacttggtcaccttttgcaagaaggaatctctgaatcgttgcaactgaaggtgcggactcggctcgggagatgttgttccttactgcagatagataattttcctttttatcaggaatctcacatgaagagtaaagagtaattaaaatgtgcaggatgacaagatggagcaaacagtgcttgtaccaccaggacctgacagcttcaacttcttcaccagagaatctcttgcagctattgaaaggcgcattgcagaagaaaaagctaagaatcccaagccagacaaaaaagatgatgatgaaaatggcccaaagccgaacagtgacttggaagctgggaagaaccttccatttatctatggagacattcctccagagatggtgtcggagcctctggaggacctggacccctactatatcaataagaaaacttttatagtattgaataaagggaaggccatcttccggttcagtgccacttctgccctgtacattttaactcccttcaatcctcttaggaaaatagctattaagattttggtacactcattattcagcatgttaattatgtgcactattttgacgaactgtgtatttatgacaatgagtaaccctcctgactggacaaagaatgtagagtacaccttcacaggaatatatacctttgaatcactaataaaaattattgcaaggggcttctgtttagaagattttactttccttcgtgacccatggaactggctggacttcactgtcattacattcgcatatgtgacggagtttgtggacctgggcaatgtctcagcgttgagaacattcagagttcttcgagcattgaaaacaatatcagtcattccaggcctgaagaccatcgtgggggccctgatccagtctgtgaagaagctctctgacgtcatgatcctcaccgtgttctgtctcagtgtgtttgctctaatcgggttgcagcttttcatgggcaacctgaggaataagtgtgtacagtggccccccaccaacgcttcccttgaggaacatagcatagagaagaatgtaactacggattacaacggcacacttgtaaatgaaaccgtgtttgaatttgactggaaatcatacattcaagactcaagatatcattatttcctggagggtgttttagatgcactactgtgtggaaatagctctgatgcaggccaatgtccagaaggttacatgtgtgtaaaagctggcagaaaccctaactatggttacacaagctttgacaccttcagctgggcatttctgtccctgtttcgactgatgactcaggacttctgggaaaatctttaccaactgacattgcgtgctgccgggaaaacatacatgatattttttgtgctggtcattttcttgggctcattctacctgataaacttgatcctggctgtggtggccatggcctatgaggaacagaaccaggccacattggaggaggctgaacagaaggaggcagagtttcagcagatgctggagcaactgaagaagcagcaggaagccgcacagcaggcggcggcagcaacagcatcagaacattccagggagcccagtgcagcgggcaggctctcagatagctcttcagaagcctccaagttgagttcaaagagcgctaaagaaaggcggaatcggaggaaaaaaagaaaacagaaagagcagtctggaggggaagagaaagatgatgatgaattccacaaatccgagtccgaagatagcatcaggaggaagggcttccgcttctccatagaagggaacagactgacctatgaaaagaggtactcttccccacatcagtctctgttgagcattcgcggctcactgttttccccgagacgcaatagcagaacaagtcttttcagcttcagagggcgagcgaaggacgtggggtctgagaatgattttgcggacgatgagcacagcaccttcgaggacaatgagagcaggagagactctctgtttgttccccgaagacatggagagcgacgcaacagtaacctcagccaaaccagcagatcctcccgaatgctggcggggcttccagcaaacgggaagatgcacagcacagtggattgcaatggtgtggtttccttggtgggcggaccctcggttccgacatcgccagttggacagcttctgccagaggtgataatagataagccagctactgatgacaatggaacaactactgaaactgagatgagaaagaggaggtcaagttctttccatgtttccatggactttcttgaggatccttcccagaggcaaagggcaatgagcattgccagcatcttaacaaatacagtagaagaactagaagaatccagacagaaatgtccaccctgttggtataaattttccaacatatttttaatttgggactgttctccatattggctaaaagttaaacatattgtcaacctggttgtgatggacccatttgttgacctggcaattactatctgtattgtgttaaatacccttttcatggccatggagcactaccccatgactgaacatttcaatcatgtacttacagtaggaaacttggttttcactgggatcttcacagcagaaatgttcctgaaaatcattgccatggacccttactattatttccaagagggctggaatatctttgatggtttcattgtgacactcagcctggtagaacttggccttgccaatgtggaagggttatcagttctccgttcattccgactgctccgagtcttcaagttggcaaagtcctggcccacactgaacatgctcattaagatcatcggcaactcggtgggcgcactgggcaacctgaccctggtgctggccatcatcgtcttcatttttgccgtggtcggcatgcagctgttcggcaaaagttacaaagattgtgtctgcaaaattgccactgactgcaaactcccgcgctggcacatgaacgacttcttccactccttcctgatcgtgttccgagtgctgtgtggggagtggatagagaccatgtgggactgcatggaggtcgcgggtcaagccatgtgccttactgtcttcatgatggtcatggtgattaggaaccttgtggtcctgaacctctttctggccttgcttctgagctcatttagtgcagacaaccttgcagccactgacgatgacaacgaaatgaacaaccttcaaattgctgtggacaggatgcacaaaggagtagcttatgtaaaaagaaaaatatatgagtttattcaacagtcctttgttaggaaacagaagatcctagatgaaattaagccacttgatgatctaaacaacagaaaagacaattgtacatctaaccacacgacagagattgggaaagatctggactgtctgaaagatgtgaatggaaccacgagtggcatagggaccggcagcagtgtggaaaagtacatcattgatgagagtgactacatgtcattcataaacaaccccagcctcaccgtgactgtgcccattgctgtgggagagtctgactttgaaaacttaaacacagaggactttagcagtgaatcagatctagaagaaagcaaagagaaactcaacgaaagcagtagttcctcagaaggaagcacagtagacatcggggcgcctgcggaggaacagcctgtcatggaaccagaagaaacccttgagcccgaagcttgcttcactgaaggctgtgtgcagagattcaagtgctgtcaaatcagtgtggaagaaggaagaggaaaacagtggtggaaccttcggagaacgtgcttccgaatagttgagcacaactggtttgagaccttcattgtgttcatgattctcctcagtagtggtgccctggcctttgaggatatatacattgatcagcgaaagacaatcaagaccatgctggagtatgcagacaaggttttcacttacatttttatcctggagatgctcctcaaatgggtagcctacggctatcaaacgtatttcaccaatgcctggtgttggctggacttcttaattgttgatgtttcattggtcagtttaacagcaaatgccttgggttactctgaacttggggccatcaagtccctaaggacactaagagctctgagacccctaagagccttatcacgatttgaagggatgagggtggttgtgaatgccctgttaggagcaattccatccatcatgaatgtgcttctggtttgccttatattctggctaattttcagcatcatgggcgtaaatttgtttgctggcaaattctaccactgtgttaacaccacaactggtgacacatttgagatcaccgaagtcaataatcattctgattgcctaaaactaatagaaagaaatgagactgcccggtggaaaaatgtgaaagtaaactttgataatgtaggatttgggtatctttctttgcttcaagttgcgacgtttaagggttggatggatatcatgtatgcagcagttgattccagaaatgtggaactgcagcctaagtatgaggaaagcctgtacatgtacctgtacttcgtcatcttcatcatcttcggctcgttcttcactctaaatctattcatcggtgtcatcatagacaacttcaaccagcagaagaagaagtttggaggtcaagacatctttatgacagaagaacagaagaaatactataatgcaatgaagaaattaggatcaaaaaagccacaaaagcctatccctcgacctggaaacaaatttcaaggaatggtctttgactttgtaaccagacaagtgtttgacatcagcatcatgatcctcatctgtctgaacatggtgaccatgatggtggaaacggatgaccagagcgattatgtgacaagcattttgtcacgtatcaacctggtgttcattgtgctgttcaccggcgagtgcgtgctgaagctcatctccctccgccattattatttcaccattggctggaatattttcgattttgtggtggtcatcctctccattgtaggaatgtttcttgcggagctgatagagaagtatttcgtgtcccctaccctgttccgagtcatccgcctggccaggattggacgaatcctacgcctgatcaaaggcgccaaggggatccgcactctgctctttgctctgatgatgtcccttcctgcgctgttcaacatcggcctcctgcttttcctggtcatgttcatctacgccatctttgggatgtccaactttgcctatgttaagagggaagttggaattgatgacatgttcaactttgagacttttggcaacagcatgatctgcctgttccaaatcaccacctctgcgggctgggacggactgctggcccccatcctcaacagcaaaccccctgactgtgaccctaataaagttaaccccggaagctcggtgaagggggactgtgggaacccatccgtggggattttcttttttgtcagctacatcatcatatccttcctggtggtggtgaacatgtacatcgctgtcatcctggagaacttcagcgttgccaccgaagaaagtgcagagcccctgagtgaggacgactttgagatgttctacgaggtctgggagaagttcgaccctgacgccactcagttcatggaatttgaaaaattatctcagtttgcagctgctctcgaaccccctctcaacttaccacaaccgaacaaacttcagctcattgccatggacctgcccatggtgagtggagaccgcatccactgcctggacatcttgtttgcttttacaaagcgggtcttgggcgagagtggagagatggacgctcttcgaatccagatggaagaaaggttcatggcttccaacccctccaaggtctcctatcagccaatcactacaacgttaaaacgaaagcaagaggaggtgtcagccgttatcattcagcgcgcttacaggcgccaccttttgaagcgaacagtaaaacaagcttcattcacatacaataagaacaaactcaagggcggggctaatcttcttgtaaaagaagacatgatcattgacaggataaatgaaaactctattacagagaaaactgacctgacgatgtccactgcagcttgtccgccctcctacgaccgggtgacaaagccaatcgtggagaaacacgagcaggaaggaaaagatgagaaagccaaagggaaatgaacacaaacaaacaaaaaataataaattgggtgacaaattgtttacagcctgtgaagtcaaaggactcctttaggaagtcaatgccaaactgactgtttttacacaaattcactttaaggtcagtgcctcaataagacagtgacccccttgtcggcaaactctgtgactcttaggtaaaggggagatgaccttgacaggaggttactgttctcactaccagctgacactgctgaagacaagagacaaatggctatgcagactgtagggaccagcgtaaaggggtgcagagctataatttgggggtttaacgtgaaacactttagtgtagtaactgtattcaccgtttgcatttcaactgccacatttgtcaggttttgtacaaactctgttagtggattcatcttttttttaaatccatatgttgtttgttacatgtgactatttttgtaaacggggtttctgttgggaaacagactaaaggaactcttttccctgtgtgtcacctgggggtattgacatccatacagccctcccatctgcacaacgatgtggttttgcatgtgagggcatgctgtaccttacgatcatgcatgagaaaaaagtcacaaggaaagcaaagtcggttcttcaacagttctacatcatctgtgtttctgcggggggacgggggggatgtactgaggtgatcatgagaccatgggctttgccgagctggctttgtcaactctagcccttagtccaaggagattgatcgatcagacaggtcattgagtcttagtaggtgcaaacttcatccaaatgtctggagtcctgttacgtttctgttcactgtctcttcaaagtctctaaattatgactctgactccctacccccagccctagcagagcgaattgaccaaaagaaccctttataaattcccgcttaaccctgcactttgtttagccatcttcagctctcagcgaggttgacactgtaatgtgttaatgaaatgctatttattgtgtaaatagtcattttactctgtggtgcacgtttgagcaaacaaataatgacctaagcacagtatttattgcatcaaatacgtaccacgagaaacgtagagtgcaagctgtccgctggtaatatactgtattctgtaccattatagatagtgtggatgctgtcagtgcatgtcgatattaccatgctgcggtatctagtttctcccaccactcagaatctcatactcatgagacaccataggtcagtggctaagtcaaggaaaccgttcagcagatttcatttctttaagtcattaagcaatagtttgcagcattttaacaatgtctgggttgtttttcaattctaagtggatgacgttcaatgtatagccagactgtacatacatgttcggaagacaacactactgcttaacctgttaaaacatgtttagagttttataagcaagtataaataactgtacaaagtcactttcttttgtttttcagcatcatgtacatatgaagaggaaattatcttcaggttgatatcacgatcacttttcttactttccgtccacagcagtttttcatggaagatatttgctaactaagaaatgaaaccatgacggggtagtggtagatctctgcttttttaatcacgggctttaagtttggattatttcataattttaagggacaaagtacactcacaacctcacatccaaattatgatttgcaattgggaaagggtagaacatttgatttatgtttattatagtgtctgtgcgaacagatgaccggaatgctttttttttctcattttttctttattccctaatttctgtttatttttctttgctttggaatcacgcatctctagattgttctaaatataaacgtgagcttcggaatttcttttcctcaaaaacagagaggatgacacttacatagtcaattatatcaagatatttgtgtttcttacagaagcagaccataggcacctctttttcttaagaaaaaaaatatttaggcaaaccgtattcatgaactgcatgttggaaaatgctactattgcccaaaatgatgctaatcacaattaaaaatgtgcaaatctaataaaaattaattttttatttt

SEQ ID NO: 397 - DNA, 4620 bp, Rattus norvegicus
taagctctgtcctcctgtcctcctgtcatcctgtcctcctgtccttccatcatgaagaagaatagagaggctcagctgtgccttttttcagctcttcttgccttcctgccctttgcttccttgctcaatggaaactcgaagtatatggtgctggtcccttcccagctctacaccgagacccctgagaaaatctgcctgcatctataccatctgaatgagacagtgactgtgacagcttccttgatatctcaaaggggaacgagaaaactgttcgatgagcttgtggttgacaaggacttgttccactgtctttccttcactatccctagattgccctcttctgaagaggaggagtcactcgacatcaacattgaaggggcaaagcataaattcagcgaaaggcgtgtggtgcttgtgaagaacaaagaaagtgttgtctttgtccagactgataagcccgtgtacaagccaggacagtcagttaaatttcgggttgtctctatggataaaaatctacaccccctgaatgagttgtttcctctggcttacattgaggatccgaaaatgaaccgaattatgcagtggcaggacattaagacagagaatgggcttaagcaattgtccttcagcctgtcagcagagcccattcagggcccctacaagatagtgattctcaaacagtcaggagtgaaggaagagcattccttcaccgtcatggaattcgtgcttcccagatttggtgtcgatgtgaaggtcccaaacgccatctctgtgtacgatgaaataatcaatgtgactgcctgtgcgatatatacctatgggaagcctgttccaggacatgtaaagataagtctttgccatggaaatccttcctttagctctgagacaaagtctgcatgcaaagaagaggactccgagctagacaacaacggctgcagcacacaagaagtgaacatcactgagttccaattaaaggaaaattacctcaaaatgcaccaggctttccatgtgaatgcaactgttacagaagaagggacagggtcagagttcagtggatctggaagaattgaagtcgaaagaaccagaaacaaattcctatttctgaaagcagactcacacttcagacacgggatcccattctttgtgaaaatccgcctagtggatatcaagggagatcctatcccaaatgagcaggtcttcatcaaagcacaagaagctggctacaccaatgctactaccactgatcagcatggcttggcaaagttctccatagataccagcagcatctcaggctattccctcaatatcaaagtctaccacaaggaggaaagttcatgtatccattcctcttgcacagcagaaagacacgcagaggaacatcatacggcctatgctgtttactccctcagcaagagctacatctaccttgacacagaagctggcgtcttgccctgcaaccagatccacacagttcaggcgcattttattctgaaggggcaggtcttgggagtgctgccacagattgttttccactacctggtcatggcccagggcagcatcctccagactggaaaccacactcatcaagtggagccaggagtatctcaagtacaaggcaacttcgccttggagatccctgtggagttcagcatggttcccgtggctaaaatgctcatctacaccatcttgcctgatggagaagtgattgcagattctgtaacgtttcaagttgaaaaatgtcttcgcaacaaagtgcacctgagcttcagcccatcccaaagtcttccagcctcacaaacccatatgcgggttacagcttctcctcagtccctctgtggcctgagagctgtggaccaaagcgtgctgctgctgaagcctgaggctgagctctccccttccttgatatatgatctaccaggtatgcaagacagcaacttcattccaagttcttatcatccatttgaagacgaatatgattgtttgatgtaccaaccaagagacactgaagagctcacatactcagtaccatatggacgagagaaggatgtctacagatatgtgagggacatgggtttaacagcattcaccaacttgaagatcaaacatcctacatattgttatgaaatgaacatggttgtactatcagcacctgctgtggaatctgaactttcaccaagagggggagagtttgaaatgatgcccttgggagtaaataaaagtccactacctaaagagccaccacgtaaagatccaccacctaaagatccagttattgagaccattaggaattattttcctgaaacctggatctgggatttagtcacagtaaactcctcaggagtgactgaagtggaaatgacagtccctgacaccatcactgagtggaaggctggagccctctgcctgtctaatgacactggtcttggcctctcttctgtggcaactctccaagccttccagcccttctttgtggagctcacaatgccctactctgtgatccgtggagaagccttcatgctcaaggccacagtgatgaactacctccctacaagcttgccgatggctgtgcagctggaagcttctcctgatttcacagctgtcccagtgggaaatgaccaagattcttattgccttggtgccaatgggaggcacacctcatcctggttggtaactcccaaatctttagggaatgtgaatttctctgtgtctgtggaagcacaacagtccccagagctctgtggttctcaggtagccacagtgcctgaaaccgggagaaaggacacagtagtcaaagtcttgatagttgagcctgaaggaatcaagaaagagcataccttcagctcacttctctgcgcatcagatgctgagctgtcagaaacattgtctctgctgcttccaccaacagtagtgaaagattcagccagagcacatttctctgtgatgggtgatatcttgagttcagccataaaaaacacacaaaatcttatccaaatgccctatggctgtggggagcagaacatggtcctttttgctccaaacatctatgttctgaaatatctgaatgaaactcaacagctgacagagaagatcaagtccaaggcccttggttacctcagagctggttatcagagagaactgaactacaaacacaaagatggctcctacagtgcttttggggatcacaatggccagggtcaaggaaacacttggctcacagcctttgtgctcaagtcttttgcccaagctcgagccttcatcttcatcgacgaatcacacatcaccgacgccttcacctggctctccaagcagcagaaggacagtggctgcttcaggagctccggatcactgttcaacaatgccatgaaggggggagtcgatgatgaaatcaccctctctgcctatataaccatggcccttctggaaagttcactcccagacacggatcctgttgtctccaaagccctgggctgcctagaggcatcttgggagaccatagagcaaggaagaaatggcagctttgtgtacaccaagacactgatggcctatgctttcgctcttgcgggaaaccaggaaaagagaaacgaaatcctgaaatcccttgataaggaagctataagggaagacaactccatccactgggaaagacctcagaaacccacaaaatcagagggttatctgtacacaccccaggcttcctctgctgaagtagagatgagtgcctatgtcgtcttagctcgcctcactgcccagccagccccatcccctgaggacctggctttgtcaatgggcaccatcaagtggctcacaaagcagcagaattcccatggcggcttctcctccacacaggacactgtggtggcccttgatgctctgtccaaatacggagcagctactttttccaaaagccagaaaactcctttggtgaccattcaatcttcagggtcattttcccaaaagttccaagtagacaacagtaatcgcctgttactgcagcaggtctcattaccagacattcctgggaactataccgtcagtgtgtcaggggaaggatgtgtgtatgctcagaccacgctgagatacaacatgcccttggagaagcagcagcctgcatttgctctaaaggtgcagacagtacccctgacttgtaacaaccccaaaggccagaacagcttccagatctcactagaaatcagttacacggggagccgtccagcctccaacatggtgattgctgatgtgaagatgctctctggcttcatcccattgaaaccaacagtgaagaagcttgaaagattagagcacgtaagcagaacagaagtgaccaccaacaacgtcctgttatatttggaccaggtaaccaatcagacactgtccttctccttcatcattcaacaagacatcccagtaaagaacctgcagcctgccattgtgaaagtgtatgactactatgagacagatgaagtggcttttgctgaatacagcagcccctgcagctcagacaaacaaaatgtttgaaactcatatctgtggacaaggcattgctggaatccccaaaccagagaactttcaaggtggtgatttgtgtttgtctctgaaatacaaatactgaacaatcttggt

SEQ ID NO: 398 - DNA, 4595 bp, Rattus norvegicus
aggaccagatctctggcggggagtagggtgcaaggcagccaggtctccgatcctttccgcagcatggggaagcacaggctccggagcctggccctgctgccactgctgctgcggctgctgctgctgctgctgcccaccgatgcctcagctccacaaaaaccaatctacatggtgatggttccctccctgctccacgcaggaacccccgagaaggcctgcttcctgttcagccatctaaacgagacagtggctgtgagagtgtccttggagtctgtccatgggaaccaaagcctcttcactgaccttgtagttgacaaggacctattccactgtacctccttcaccgtcccacagtcttcatctgatgagctgatgtttttcactgtccaagtaaaaggagcaactcatgagttcaggaggcagagcacggtgctggttaagaagaaagagagcctggtctttgctcagactgacaagcccatctacaaaccaggacagacagtgagatttcgtgttgtctcattggacgaaagtttccatccccttaatgaattgattcctctactgtacattcaggatcccaaaaacaatcgcattgcacaatggcagaatttcaatttagagggtggcctcaaacagctgtccttccccctctcctcagagcccactcagggctcctacaaggtggtgatacgtacagaatcaggcaggaccgtcgagcaccctttctctgtggaggaattcgtgcttcccaagttcgaagtgagagtgacagttccagaaacaatcaccatcctggaggaagagatgaatgtgtccgtgtgtggaatatacacctatgggaagcctgttccaggacgtgtgactgtaaacatttgcagaaagtacagtaatccttctaactgcttcggcgaagagtccgtggctttctgtgagaaactcagccaacagttagacggccgtggctgcttctcacagctagtgaaaaccaagtccttccagctaaagagacaagagtatgagatgcagctcgatgtacatgccaagatccaagaagaaggaacaggtgtggaagaaactggaaaggggctcactaagatcacaagaaccataaccaaactatcatttgtgaacgtggattcacatttcagacaaggaattcctttcgttggacaggtgctcctggtggatgggagaggcacccctattccgtatgaaacgatcttcattggggcggatgaagcaaacctgtacataaatacaaccactgataagcacggcctggcgaggttctccatcaacaccgatgacatcatgggcacgtccctaactgtcagggccaaatacaaggatagcaacgcctgctatggattcagatggttgacagaagagaatgtagaggcttggcacactgcctacgctgttttctcaccaagcagaagcttcctgcacctggaatccctgcctgataaactgcgctgtgaccaaaccctggaggtccaggcacattacattctaaatggcgaggccatgcaggagctgaaggagctcgtcttctactatctgatgatggccaagggaggcatcgtacgggcggggactcacgttctgcccctgaagcagggacaaatgagaggtcacttttccatactcatctcgatggagacagacctggctcccgtggctcgactggtcctctatgccatcctacccaatggagaagtggttggagacactgctaaatatgagattgagaactgcctggctaacaaggtggatttggtcttccgcccgaatagcggtcttccagctacccgtgccctccttagtgtcatggcttctcctcagtccctttgtggcctgcgagctgtggaccaaagcgtgctgctcatgaaacctgagactgagctctccgcatccctgatttatgacctgctaccagtgaaagacctcactggcttccctcagggtgcggatcaacgggaagaagacactaatggctgcgttaagcaaaatgacacttacattaatggaatcctgtactcgccagtgcagaatacaaatgaagaggacatgtacggcttcctaaaggatatgggcttaaaggtatttaccaactcgaacatccgtaaacccaaagtctgcgaacggctcagagacaataaaggaataccagctgcgtaccacctcgtaagccaaagccacatggacgcttttctagagtcttcagagtctcccacagagactaggcgaagctacttccctgagacgtggatctgggacttggtggtggtggactcagcaggagtggctgaagtggaagtgacagtccccgacaccatcactgaatggaaggccggggccttctgcctgtctaatgacactggtctgggcctgtctcctgtggtccaattccaagccttccagcccttcttcgtggagctcacaatgccctactccgtgatccgtggagaagccttcacgctcaaggccactgtgctgaactacctccctacatgcatccgggttgccgtgcagctggaggcctctcccgattttctggctgccccagaggagaaggaacaaaggtctcactgcatctgtatgaaccagcggcacaccgcgtcctgggcagtgatccccaagtcattaggaaatgtgaatttcacagttagtgccgaggcactgaactctaaggagctgtgtgggaatgaggtaccggtggtccctgaacagggcaaaaaagacacgatcatcaagtccctgctggttgaacccgaaggtctagagaacgaagtgacatttaacagtctgctttgtccaatgggtgctgaggtatctgaactgatagccctgaagctgccatcagacgtggtagaggaatctgccagagcctctgtcacagttttgggagatatattgggttctgccatgcagaatacacaggatctcctcaagatgccctatggctgtggagaacagaacatggttctctttgctcctaatatctatgtcctggactatctgaatgaaacacagcagctgacacaggagatcaagaccaaggccattgcctatctcaatacgggctaccaaagacaattaaactacaagcaccgggatggctcctacagcgcctttggggataaacctggcaggaatcatgccaatacctggctcacagcctttgtactgaagagttttgctcaggctcgaaaatatatcttcatcgatgaagtacacatcacccaagccctcttatggctctctcagcagcagaaggacaatggttgtttcaggagctccgggtcactgctcaacaatgccatgaagggaggagtagaagatgaagtcaccttgtctgcctacatcaccatagctctcctggagatgtctcttcctgtcactcatcctgttgtccgcaatgccctcttttgcctggacacagcctggaagtcagcaaggggaggagctggtggcagccatgtctacactaaggcgctgttggcctatgcatttgcccttgctggtaaccaggacacgaagaaggagatcctgaaatcactcgatgaggaggctgtaaaagaagaagattctgtccactggaccagacctcagaaacccagcgtgtcagtgggcctctggtaccaaccccaggctacctcggctgaggtagagatgactgcatatgtgctcctggcttatcttaccactgagccagctccaacccaagaggacctaacggctgccatgctcatcgtgaagtggctcacaaagcagcagaattcccacggtggcttctcttccacccaggacactgtagtggctctccacgctttgtccaaatacgggtccgccactttcacaagagctaagaaagctgcacaggtgaccatccgttcttcgggcacattttctacaaaattccaagtcaacaacaacaaccaattattactccagagagtcacattgccgactgtgcctggggattacaccgtgaaggtgacaggagaaggctgtgtctacctccagacatccttgaaatacagtgttctcccgagagaggaggagttccccttcgctgtggtggtgcagactctgcctgggacatgtgaggatcccaaagctcacaccagcttccagatctcactcaacatcagttacactggaagccgttctgaatccaacatggcaattgctgacgtgaagatggtgtccggcttcatccccttgaaaccaacagtgaaaatgcttgaaagatctgtgcatgtgagccgaacagaagtcagcaataaccatgtcttgatttacctggataaggtgtcaaatcagacggtgaacttgtccttcacggttcagcaagatattccaataagagacctgaagccagccgtagtgaaagtctacgattactatgagaaagatgagtttgcagttgcaaaatacagcgctccctgcagcacagattatggaaatgcctgaggacgcagtgaataagaagtgtttcgccagagccctgacctcaggacttcccaagaaaaacagtgtatttgtatttccagagatttgatcaataaaccatttttttcatatct

SEQ ID NO: 399 - DNA, 1843 bp, Rattus norvegicus
ggcacgagcgccgagagaaccgcggccagagcgcggagaggcctgcgggcggcgacggcagcgggagggcgggcgccgtcgggccggagcctcccccgagccgcgccgcgctctggctccgagccgtgagccctttttgccgcgccccgagcgcgtggccgggggccgggcggggcgggcgctcccggaggccggggccggcggctgcccgctgggcttgggcggggcgcgggctgcccgctccgcggctcggtggtcccgccgggggccggcggcgggggaggcggcggggacgcgcggctcgccgccatggacgacaaggcgttcaccaaggagctggaccagtgggtggagcagctgaacgagtgtaagcagctgaacgagaaccaagtgcggacgctgtgcgagaaggctaaggaaattttaacaaaagaatcaaatgtacaagaggttcgctgtcctgttaccgtctgtggagatgtgcatggccaattccatgaccttatggaactcttcagaattggtggaaaatcaccagacaccaactatctattcatgggtgactatgtagacagaggatattattctgtggagaccgtgactcttcttgtagcattaaaggtgcgctatccagagcgtatcacaatattgcgaggaaatcatgaaagccggcagatcacacaagtatatggcttttatgatgaatgcctacgaaagtatgggaacgccaacgtgtggaaatactttacagatctctttgattatcttccacttacagctttagtagatggacagatattctgcctccacggtggcctctctccatccatagatacactggatcacataagagccctggatcgcttacaggaagttccacatgagggcccaatgtgtgatctcttatggtcagatccagatgaccgtggtggctggggcatttctccacgtggtgctggctacacatttggacaagacatttctgaaacatttaaccatgccaacggcctcacactggtgtcccgtgctcaccagcttgtaatggaaggatataattggtgccatgatcggaatgtggtcaccatttttagtgcacccaattactgctaccgctgtgggaaccaggctgctatcatggaattagacgacactttaaaatactcttttcttcagtttgacccagcacctcgtcgtggagagcctcatgtgacccggcgcaccccagactacttcctataaattcctccccaggacctgtctttgtatgttgaagtatacctggctttttaaaaaatatatatacatatatatatttaaaaacaacagttatctgtgtgtctctgtaacaaattgtgctatgtcttgacgttaaaacacatcatggaccaaaacgtgccatactaatggtgagccatcagcacggtgtgaacttgagtccactgtcctagccgagtcaaccaggcagccgcctgcccgcctgcctgctgtagtagccgtccttcgtgactggttaagggaaagggtcactggtggcttcatctcctttgcgcttacttggaaatttagttacaagtttaactggcatggattatagagttggagttttatttttaagaattgacaagctgacttccacttaaattcataaccctttattttgttgaaatgtatgactaactgaagaagagattcttggagtatgttgtcataacactaagatttcctttcaagtttcctgaactgaattactgttggatgttgacctgcacattctgtatatttgtcctgacagtgttgcatcctccttgctgtactgaacaaataaacttcccaatttagagag

SEQ ID NO: 400 - DNA, 1322 bp, Rattus norvegicus
tccttggattcgggagtattgcaaactctacccagccagtttgcactcttcagctcagcatcttggaaagctctgcagagtctccacttcgcagactccaggatgccgggaccttggttgctgctggctctggctttgatcttcaccctaactggtatccctgaatcctgcgccttgccggaggcagcccaggaggaaggtgcagtgactcctgaccttcctggcctggagaatgttcaggtccggccagaacgtcgattcttgtggaaagacctccagcgggtgagaggggacctcggtgctgccttagactcctggatcacaaaacgccagcatccaggcaaaagggaggaggaggaaaaagacattgaagctgaagagaggggagacttgggagaagggggagcctggagactccacaaacgacagcaccccggccgacgtgccaaccaggacaagtattcatgggcagatgaggaggacagtgactggatgccacggtcctggttaccagatttctttctggattcctggttctcagatgtcccccaagtcaagcggcagcaccctggcaggcgatccttcccctggatggagtctgatgtcaccaagaggcaacatccaggccggaggttcatagatcccgagctccaaagaagctgggaagaaaaagagggagagggtgtcttaatgcctgagaaacgccagcatcctggcaaaagggcattgggtcatccctgtgggccccaggggacttgtggtcaaacaggcctgctccagcttctaggtgacctgagcaggggtcaggagaccctggtgaagcaaagcccacaagtggaaccctgggacaaggaacctctggaggagtaaggccagagtcaggctttaggtctaggatgatgtaagccctgtattccctatcctgttcccttcactagctgtcctctcttagatgctaaccctgggccctctgtacatcgtccacccaaaccccttccttaccgacttcagagactttagaaagccagtcaggaagttaaaaccctacttatcccttcaagcaagggggtgggagtcacaccccttcagcactggccaagatggttctttcacaccttctaagggacctcctcagaaaggaagggtagaattgaaatgttttggtgttaaaacttctgtaatctgccccatgtggtaagactgacctggtatagcttcagcgcatcctccaaggttggggtccctgagcagtttgggagatgtttagatatgtccttggggtggggggacgcatcttgtatataaccctgctcttgggaatc

SEQ ID NO: 401 - DNA, 2585 bp, Rattus norvegicus
ggggagagcctgcgggggagctaatcagctcagcgccaaggagaagcccctgcgagagtgggaaagaagcaagcaaggcacgggacacggaagaaacggggagcaaaatgaagggagagctgttgtgcgtcctgctgctttgtggagtggcgttcacgttgcctgaccagggaatacacaggaggttcagaagaggagctcggtcctacagagcgacctgcagagatgaacagactcagacaacttaccaacagcatcagtcatggctacgtcccatgctcagaggcaatcgggtggaatactgccggtgcaacagcggcctggcacagtgccactcggtgcccgtccgaagttgcagtgaaccgagatgcttcaatgggggtacgtgtcagcaggccctgtatttctctgacttcgtctgccagtgccctgacggatttgttgggaaacgctgtgatatagataccagagcaacctgcttcgagggccagggcatcacctacagaggcacatggagcacagcagaaaatggggctgaatgcatcaactggaatagcagtgccctgtcccagaagccctacagtgcaaggaggccaaatgccatcaagctgggccttgggaatcacaattactgcagaaacccagaccgagacgtgaagccctggtgctatgtctttaaggcagggaagtataccacggagttctgcagcacgccggcttgccctaagggaccaactgaggactgctatgttggaaaaggtgtgacttaccgtggcacccacagctttaccacatccaaggcctcctgcctcccatggaattccatgatcctgataggcaagacttacacagcgtggagggccaactcccaggcacttggcctgggcagacacaattattgccggaacccagatggggatgccaaaccttggtgccacgtgatgaaggaccgaaagctgacatgggaatattgcgacatgtccccatgctccacctgcggcctgaggcaatacaaacagcctcagtttcgaattaaaggaggactcttcacagacatcacctcacacccttggcaggccgccatctttgtcaagaacaagaggtctccaggagagagattcctgtgtggaggggtgctgatcagttcctgctgggtgctatctgccgcccactgctttgtagagaggtttccaccccatcatcttaaagtggtcttgggcagaacatacagagtggtccctggagaggaggagcagacattcgagatcgaaaagtacatagtccataaggaatttgatgacgacacttatgacaatgacatcgcattactgcagctgaggtcagattccagtcagtgtgcccaggagagcagttctgtcggcactgcctgcctccctgaccccgacgtacagctccctgactggacagagtgtgagctttctggctacggcaagcatgaggcatcctctcctttcttctctgaccggctgaaggaggctcacgtcagactgtatccgtccagccgctgtacctcacagcatctgtttaacaaaaccatcacgagcaacatgctgtgtgcaggagacacccgaactgggggcaaccaagacgtccatgacgcgtgccagggtgactcaggaggccctctggtgtgcatgatcgataagcggatgactttactgggcatcatcagctggggcctcggctgtgggcagaaggacgtgccagggatatacacaaaggtcactaattacctgaactggatccaagacaacatgaagcaatgacaaagaaagcccagctccttaaacccagaggacctgccttcctcttcctcttccacagaagatacgcctgaaaggccaagcgttcttcgcaggctcgtcctcctgagctgccgctcagcagagggagtgacagtctttaggcacagacagcgtttactttgtgacaggtacttcacaaacttgtacgttttaagggtgaaggtctgactttagaatcagttctgtcagatgagatgacagggaaatgccaaccttcctataactctaagattttaaaaagagaagtagaccaaagtccacccttcctggaccactattttgtacactgaaccacaagatcgtgtctcaacagtgaaatacaacttgatctttcaggagtaaaagtctgcactgaggacaagaatgtgtttttatagttacacaggggcccagcatggcctccaagagaaggaaggggttagctgatcagaccacagccccctaaaacccttgaaatcaaatattccccatcctcccacaatcctcaactcttggggcatatccctttgtacacagtgtagatgtctttttctttataaactttccagatggctgggagaactgtatgattttaatattcgatgaaatgacactagtatatttatatttgaatctatttagtttttactgtgttactagaactctgtattatgctgtactgaaataataaattccaaggtatttttcacacttaaaaaaaaaaaaaaaaaaaaaaaaaaaaaaaaaaccaaaaaaaaaaaaaaaaaaaaaaaaaaaaaa

SEQ ID NO: 402 - DNA, 3053 bp, Rattus norvegicus
cccccgagagctttgtgaaggaggaacgctgcacacccgcctcccgcagcacacagccaaccacagctgagcgacacgcaacaagagccaatcacaaggcacttccgaaagctccaggatgcagatgtcttcagccctcacttgcctcaccctgggcctggttctggtctttgggaaagggttcgcttcaccccttccagagtcccatacagcccagcaggccaccaacttcggagtaaaagtgtttcagcatgtggtccaggcctccaaagaccgaaatgtggtcttctctccctacggcgtgtcctcggtgctggctatgctgcagctgaccacagcagggaaaacccggcagcagatccaagatgctatgggattcaatatcagtgagaggggcacagctcctgccctccgaaagctctccaaggagctcatggggtcatggaacaagaatgagatcagtactgcggacgccatctttgtccagcgggacctagagctggtccagggcttcatgccccacttcttcaagctcttccggaccacggtgaagcaggtggacttctcagaggtggaaagagccagattcatcatcaacgactgggtggagaggcacaccaaaggtatgatcagtgacttactggccaagggggctgtaaatgagctgacacgcctggtgctggtgaacgccctctatttcaacggccaatggaagacccccttcttagaggccagcacccaccagcgcctgttccacaagtctgatggtagcaccatctccgtgcccatgatggctcagaacaacaagttcaactacactgagttcaccactccggatgggcacgagtacgacatcctggaactgccctaccacggcgaaaccctcagcatgttcattgcagcaccctttgaaaaagatgtgcccctctccgccatcaccaacattttggacgctgagctcatcagacaatggaagagcaacatgaccaggctgccccgcctcctcatcctgcctaagttctctctggagactgaagtggacctcagagggcccctggagaagctgggcatgactgacatcttcagctcaacccaggccgacttcacaagtctttccgaccaagagcagctctctgtagcacaagcactacaaaaggtcaagatcgaggtgaacgagagcggcacagtggcgtcttcctccacagccattctagtctcagcccgcatggcccccacggagatggttttagaccgatcctttctctttgtggttcggcacaatccaacagagacaatcctcttcatgggccagctgatggagccttgagagtgggatgagaagcctttcctttgggacaaaactggacgtgttataagcagagactctgaagaaaagaattgttttaaggactctttggggagaaagagaaggcctttctttcttaccccggcactggtaaatctttccaaccagcctcccagacctcagactctcgaagaggaaagagtctaactccctcactagggacctatcttactaaggtctcatccaaccatagaactcacagaatctggatctgcccagcattcagcctttggacccagttcccaccaaggccccagcagggccaacccactacgccttcactcagcaaagtcttttgtgttccagtcacactctgggtacctcttgtatcgtcctccattgctatgaaggatgacccaggccaaaggaagaagcactgtcctatctcaaggtccactgtggaaatgaacaccttgcccatccccaaggggcagcagatagacagatcgaatgatcgcccgatatcaagccttctcccagctcccgtcctgccctcccttccctgacagccgccttgtgttatttcagagtgtagatgacttgtttacagcttttttcgacccacaaacttttctcattttgaaagcgtgaaagaaaggtcagatgtgcacgtgccttgctctttatcctgggtctccctgtgaggggagaggggtcctggggagattccaggggtgtgattgaatatttatcttgtttatcttatacgtttgttggggagaagaagcactattaaggagaaagccttttatttaaaccatggcatatggtgtcccatttggggtctgtatccctgtatgtcagggaggcatcactccacaaacccgcccctcgggtggcccggcgtcggggctcacactgccgcctagtggcagccgaacacgcccttgccccatccctcccccgcatcctcccccgtggctcttttccttagggatcttgccaaggtgatgcttggcagcccacggtaaaggaagggggaaaaagattaggtgggagagagagagagagagagagagagagagagagagagagagagagagagagagagagagagagagagaaagagagagagatgtttgagagagggcaaagtggtttcaaatttttccaatacattcagaagccgagtgggaaagggggctgtgtgacctaacaggacagaactttctccaattactgggtgactcagctgcactggtgactcacttcaatgtgtcatttccggctgctgtaagtgagcagtggacacgtgggggggggggggtgaggatgaaagaaacagccagctcctggtcaaccaccttagttagataatcttttttgaaagcttcctagctgggggtatgatcagaaaaccaatttactgaaaaactgcacaggaaggtaacgtgaatctaatttcatagcgggccgctctgcatccgttacatctccactggaaaaaaataatcattttctttttgtgtgtgtgtgtgtgttttagcttttctccctctccctctttctctctcatttcattatgcactggataaccatacaccgtgtaccacaggggcccaaatgtggggtcacatggtcttgaattttgtggggtacatatgcctttgtttgtttgttttcacttttgatatataaacaggtaaatgtgtttttaaaaaataataaaaatagagaatatgcagac

SEQ ID NO: 403 - DNA, 399 bp, Rattus norvegicus
accgtgtacaaggaataattaccttttttggcattttcctcctaggaaaacggatgtgtgcaggagagggcctagcccgtatggagttatttttattcctgaccacgattttacaaaactttaagctgaaatctgtacttcacccaaaggatatcgatacaactccagttttcaatggatttgcctctctgccaccattttatgagctgtgcttcattcctctctaaagagatcaaattggctggggatttagctcagtggtagagcgcttacctaggaagcacaaggccctgggttcggtccccagctccgaaaaaaagaaccaaaaaaataaataaataaataaataaagagatcaaattgcctggctccggatgtattgtattttctcccttcaaa

SEQ ID NO: 404 - DNA, 3320 bp, Rattus norvegicus
ctccctgcccaccagcatcatggccaagggtttctacatttccaagaccctgggcatcttgggcatcctgttaggtgtggcagccgtatgcaccatcatagctctgtcggtggtctacgctcaggagaagaacaggaatgcggagaactctgccatagcccccacgctcccaggcagcacctcagccaccacctcaactaccaaccctgctatagatgaaagcaaaccttggaaccagtatcgcttgcctaagactcttatacccgactcctaccaggtgaccttgaggccttacctcacccccaacgagcagggcctgtacatcttcaaaggttccagtactgtccgctttacctgcaacgagaccacaaatgtcatcattatccacagcaagaagctcaactacaccaacaaagggaaccacagggtggcgttgcgagccctgggtgacactccggcacctaacatcgacacaacggaactggtagagcgcacggagtacctggtggtgcacctgcagggctccctggtaaagggccatcagtacgagatggacagtgagttccagggggagctggctgatgatctggctggcttctaccgcagcgagtacatggaaggtggcaacaagaaagtggtggccaccacacagatgcaggctgccgatgctcgaaaatcctttccttgcttcgatgagccagccatgaaggcctcattcaacatcacgctcatccaccccaacaacctcaccgctctgtctaacatgcttcccaaagattccaggacccttcaggaagatccttcctggaacgtcactgagttccaccctaccccgaagatgtccacatacctgctggcctatatcgtgagcgagttcaaatatgtagaagccgtctcacccaatagagtccagattcgaatctgggctcggcccagtgccattgatgagggccatggtgattacgctctgcaagtcacaggccctatcctaaacttctttgcccaacattataatacagcctaccctctagaaaaatctgaccagattgccctgcctgacttcaacgctggagccatggagaactgggggctcgtgacctaccgagagagtgccctggtctttgaccctcagtcctcctccattagcaacaaggagcgggtggtcactgtgattgcccatgagctggcccatcagtggtttggcaacctggtgaccgtggattggtggaatgacctgtggctgaacgagggctttgcctcctatgtggaatttctgggtgctgactatgcagagcccacctggaatctgaaagacctcatagtactgaatgatgtgtaccgtgtgatggccgtggacgcgctcgcttcctcccacccgttgtccagccctgccaacgaggtcaacacgccagcccagatcagtgagctgtttgacagcatcacctacagcaagggagcctcagtccttaggatgttgtccagcttcctgacagaggacctgttcaagaagggcctttcgtcttacctccacaccttccaatactcgaacaccatttatctggacctgtgggaacaccttcagcaggcagtggacagtcagacagctatcaaactcccagcctcagtgagcaccatcatggaccgatggattctacagatgggttttcctgttatcactgtgaacaccagtacgggagaaatctaccaggaacacttcctcctggaccccacttccaaacctacccgcccctcagattttaattacctctggattgtgcccattccgtatctcaaaaatggaaaggaggatcactactggctggagaccgagaaaaaccagagtgcagaattccaaacatcctccaatgaatggctcttactgaacattaatgtaaccggctactaccaggttaactatgatgaaaacaactggaggaagattcagaatcagctgcaaacagacctttctgttatccctgtcatcaaccgtgcgcagattatccacgactccttcaacctagccagtgctggaaagctatccatcactctgccgctgagcaacaccctcttcctggccagtgaaacagaatacatgccctgggaggctgccctgagcagcctgaactacttcaagctcatgtttgaccgctcggaggtctacggccccatgaagcgctatctgaagaagcaagtcacacccctcttcgcctacttcaaaatcaaaaccaacaactggctcgaccgtcctccaacactgatggagcagtacaacgaaattaatgccatcagcaccgcctgttctagtggtctcgaagagtgtagggatctcgttgttgggctttatagtcagtggatgaacaactctgataataacccgatccaccccaaccttcggtctactgtctactgcaatgccattgctttcggtggtgaggaagagtggaactttgcttgggaacagttccggaaagcaactctggtgaacgaggcagataaactccgctcagccttggcctgtagcaacgaggtgtggattttgaacaggtacctgagttacactctgaaccccgactacatccggaagcaggatgctacctccaccatcgtcagcatcgccaacaacgtggttggacaaactctagtttgggactttgtccgaagcaactggaagaaactgtttgaagattacggcggaggatctttctcctttgccaatctcatccagggagtgacccggcgcttctcctctgagttcgagctgcagcagctggagcagtttaaagaggacaactcggccacaggctttggctccggcactcgggctctggagcaagccctggagaagactaaagccaacatcaagtgggtgaaggagaacaaagacgtggtactcaagtggttcacagaaaacagctagttagtcccgggccgagaaccatctgtcccggcgtgacgcctatgactatctcagcagcctgtgcagggtctctgtcttcagagcgccagacaccggcatctgaccctcaaggtcaaagtctccagcctatggagctagcctagctcctaattgtcagactgccagacacctcccggtccttgcccctcgtgccaactctgccccaggcccaggcctctggggctgatctcagggaagcccagctctgagtctagatttactggacaaagggtagcctagaaagagtctccctgaatgccttactactttccccccacaagacccagaaccaaagaatcaacagggcacaaagatctatatatatttttaagagaaaatgtaaataaagaatttctaaaatgag

SEQ ID NO: 405 - DNA, 2914 bp, Rattus norvegicus
aaaggaattccgcgcttggagcccactgagctcggacaggccaggggtacgctttgcccccaggcgccccacaagacagagcgggagccatggagcctccggccgccccctcggaaaggagcctgtctctctctcttccggggccccgggagggccaggccaccctgaagccgcccccccagcacctgtggcggcagccgaggaccccgatccgcatccagcaacgcggctacccggacagtgccgagcgctcagagacagagcgctcaccgcaccggcccatagagcgcgccgacgccgtggacactggcgaccggccaggcctgcggactacccgcatgtcctggccctcgtccttccacggcaccggtaccggcggaggcagcagtaggcgcttggaggcagaaaatgggccaacgccatcccctggccgcagccccctggactcgcaggcgagcccggggcttgtgctgcatgctggggccaccaccagccagcgccgcgagtccttcctctaccgctcagacagcgactatgacatgtcaccgaaggctgtgtccaggagctcgtctgtcgccagcgaagcgcacgctgaggacctcattgtgacaccatttgcccaggtgctggccagtctccgcagcgttcgaagcaacttctcactcttaaccaatgtgcccatccccagcaacaagaggtctccactgggtggcccaccctctgtctgcaaggccacactgtcagaggagacgtgccagcagctggcccgggagaccctggaagagctggattggtgcctggagcagctggagaccatgcagacctaccgctctgtcagcgagatggcctcacacaagttcaaaaggatgctgaaccgtgagctcacacacctgtcggaaatgagcaggtcaggaaaccaggtctcagagtacatttccaacacattcctggacaagcagaatgaagtggagatcccctcacccacacctcggcagagagccttccagcagcccccgccgtcagtgctgcgacagtcccagcccatgtctcagatcacagggctgaaaaagctggtacacactggaagcttgaacaccaacgtcccacggtttggagtcaagacagatcaagaggacctcttagcacaagaactggagaacttgagcaaatggggcctgaacatcttttgtgtgtcggagtacgctggaggccgctcactcagctgtatcatgtatacgatattccaggagcgggacctactgaagaaattccacatccctgtggacaccatgatgatgtacatgctgaccctggaggaccactaccatgccgacgtggcctaccacaacagcctgcacgcagcggatgtgctgcagtccacacacgtgctgctggccacgcccgcactggacgctgtgttcacagacctggagattcttgctgccctcttcgctgctgccatccacgatgtggaccaccctggcgtctccaaccagttcctaatcaacaccaattcggagctggcgttgatgtacaacgatgagtctgtgcttgagaaccaccacctggctgtgggattcaagctgctgcaagaagagaactgcgacatcttccagaacctcagcaagcgccagcggcagagcctgcgcaagatggtcatcgacatggtgctggccacagacatgtccaaacacatgaccctcctggctgacctgaagactatggtggagacgaagaaagtgaccagctccggagttctcttgctggacaactactctgaccgtatccaggtcctcaggaacatggtgcactgtgcagacctcagcaatcccaccaagcccctggagctgtaccgacagtggaccgaccgcatcatggctgagttcttccagcagggcgaccgagaacgggagcgtggaatggagatcagccccatgtgcgacaagcacacagcctctgtggagaagtctcaggtgggcttcatcgactacattgttcatccattgtgggagacatgggcagatctcgtccacccggatgcccaagacatcctggacacgctggaagacaaccgggactggtaccacagtgccattcggcagagtccttccccacccctggaagaggagccaggggggcttggccatccgtccctgcctgacaagttccaatttgagctcaccttggaggaagaggaggaagaggattccttggaggttccaggattgcctaccactgaggaaaccttcctggctgcagaggatgccagagctcaagctgtggactggtcaaaggtcaaaggcccgagcactacagtggtggaagtggcagagcgcttgaagcaggagaccgcctcagcatatggtgctcctcaggagtccatggaggctgtaggctgttccttcagccctgggacccctattctgcctgacgtgaggaccctatcctcctcagaggaggccccgggcctcctgggcctcccctccacggcggcagaggtggaggccccaagagaccatctggctgccacgagggcttgttctgcctgctctgggacctcaggagacaattctgccatcatctctgctccaggcaggtgggggtcaggcggagaccctgcctgatcctttttcccttcacccttgggtcctccctcctccccacacttcccactcaccacagaccgcctcagcgactcctggccctcctgagaaaaaagaaaacagaaaagtggggtttttttctcttttcttttttttaaccctttcccctctgcccttgtccacagggcctttttgttgaggtggggtatggggagccaggaactgaagtccccaaaaaaagggattttattttttgaattttaattgtaaagtttttagaaaaagaacaaaaaaaaaaaaaaaaggaattc

SEQ ID NO: 406 - DNA, 2297 bp, Rattus norvegicus
agacctgaaaggggaatttcctaaatctccaggctggacagtttgtttctccctctcacctcctataactcatctgagtcttatctccatatcacatttctaagtctcttgtactcagagtcattgtgactcttgggaggccagagccaggctgaacagagtccttccctgcagtactctatgagaatatgtctttgggtttgaaagaaaggtggtgttatcacctacattggctccagcggatcctcccccagccggaccagcccagagtccctctatagtgacagctccaatggcagcttccagtccctgactcaaggttgtcccacatacttcccaccatcacctactggctccctcacccaggaccctgcccgctcatttggcactgtgccacccagcctcagtgatgatagctccccttcttctgcttcatcatcatcatcatcttcctcctcctccttctataatgggagcccccccggaagtctacaagtggccatggaagacagcagccgagtgtcccccagcaagggcaccagcaacattaccaagcttaacggcatggtgctactgtgtaaagtgtgtggggacgtggcctcaggcttccactatggcgtgcatgcctgcgagggctgcaagggctttttccgccggagcatccagcagaacatccagtacaagcggtgtttgaaaaacgagaactgctccattgtccgtatcaatcgcaaccgctgccagcagtgtcgcttcaagaagtgtctctccgttggcatgtctagagacgctgtgcgttttggacgtatccccaagagagagaagcaacgaatgcttgctgagatgcagaacgccatgaacttggccaacaaccaactgagcagcctgtgccctctagagacctcacctgccccgcaccccacctcaggctccgtgggcccctcaccacctcctgcaccagccccgacacctttggtgggcttctctcagttcccacaacagctgacaccacccagatccccgagtcctgagcccacggtggaggatgtgatatcccaggtggccagggcccatcgagaaatcttcacctatgcccatgacaaattaggcacctcacctggcaacttcaatgccaatcatgcatcaggtagccctccggctaccactccacagtgctgggagagtcagggatgcccgtctacccccaacgacaacaaccttttggcggctcagcgtcataatgaagcactgaatggtctacgccagggcccctcctcctaccctcctacctggccttctggccctgcccaccacagctgccaccagcctaacagcaatgggcatcgcctgtgccccacccacgtatactcggccccagaaggcaaggcacctgccaacggtctacggcaaggcaacaccaagaatgttctgctggcatgtcccatgaacatgtatccccatggacgtagtggccggactgtgcaggagatctgggaagacttctctatgagcttcacacccgctgtgcgggaggtggtagaatttgccaaacagatccccggcttccgtgacctttctcagcacgaccaggtgaccctgcttaaggctggcacctttgaggtgctgatggtgcgctttgcgtcattgttcaacgtgaaggaccagacagtcatgttcctgagccgcacaacctacagcctgcaggagctcggtgccatgggcatgggtgacctgctcaatgccatgtttgacttcagcgagaagctcaactctctggcgcttactgaggaggagctgggccttttcacggcagtggtacttgtctctgcagagggctcgggaatggagaattccgcttcggtggagcagctccaggagacgctgctgggggctcttcgggctctcgtgctgaagaaccggccctcggagacttcccgcttcaccaaactgctgctcaagctgccggacctgcggaccctgaacaacatgcattccgagaagctgctgtccttccgggtggacgcccagtgacccgcccggccggccttctgccgctgcccccttgtacagaatcgaactctggacttctctctcctttacgagacgaaaaggaaaaccaaaccagaatcttatttatattgttataaaatattccaagatgagcctctggccccctgagccttcttgtaaataactcttcccccccacccccatgctcccttcctcccgtatttaaaccactcttgctctcccaccctcctctggcccctcgatttgttctgttcctgtctcaaatccaa

SEQ ID NO: 407 - DNA, 3541 bp, Rattus norvegicus
tgggtgggtgtctcaaaaaacaaaaaactcagaagatacaaatggagaaaaaaaatctaaacaccccaaaagaaacccaaggatgacagtagtaagaattttaacgcaaacctagaaggtgacaaaaaacctaagtgtgaatatacggattgtgaaaaagagttaaaaaatctaccagaatgctcacagaaaaacgtcactctctccaatggctcatgtactccagataaaattataaatttagatgtaccaccagggactcacaactttaacttaacaaactgcacaccagacatagaagctaatacctcaatttgtttggagtggaaaataaaaaacaaatttacctgcgacattcaaaagatttcatacaatttccgttgtacaccagagatgaaaacatttgctttggacaaacacggaacactttggttacacaaccttacagtccgaacaaattacacatgtgctgcggaagtcctctacaataacgtaatacttttaaaacaagacagaagggtgcagactgattttgggactccagaaatgcttccccatgttcaatgtaagaattcaactaacagcacaacattagtctcctgggctgagccagcatctaaacaccatggatacattttatgctataaaaagaccccttcagaaaaatgtgaaaatttggctaatgatgtgaacagttttgaggtgaaaaacctgaggccttatacagagtacacagtgtctctatttgcctatgttattgggagggtgcaacgaaatggccctgctaaggattgcaactttcggacaaaagcagctcgtccaggcaaagtcaatggtatgaaaacctcccgggcgtcagacaatagtataaatgtcacgtgtaattctccttatgaaattaatggccctgaagcgcgttacattttggaagtcaaaagtggaggttctttagttaaaactttcaaccaatccacatgtaaatttgttgtagacaatctctattattcaactgactatgagtttctggtctatttttacaatggagagtacctgggagacccagaaataaaacctcaatcaacatcttataattctaaagcactgattatattcctggtgtttctgattattgtgacatcaatagccctgcttgttgttttgtataaaatctatgatctgcgtaagaaaagatccagcaatttagatgaacagcaggaactcgttgaaagggatgaggagaagcagctgataaatgtggacccaattcattctgaccttttgttggaaacatacaaaagaaagattgccgatgagggtagactgttcctggctgaatttcagagcattccacgggtattcagcaagtttcccatcaaagatgcccgaaagtcccaaaaccagaacaaaaaccgttatgtggacattctcccctatgattacaaccgtgtggagctctctgaaataaatggagacgcagggtccacctacataaatgccagctacattgatggcttcaaggaacccaggaaatacattgctgcacaagggccccgggatgagacagttgatgacttctggaagatgatctgggagcagaaggccacagttattgtcatggtcacacgatgtgaagaaggaaacaggaacaagtgtgcagaatattggccatgcatggaggaaggcactcggactttcagagatgttgtcgtgacgatcaatgaccacaaacgatgtcctgattacattatccagaagctgagcattgcccacaaaaaagaaaaagcaactggaagagaagtgactcatattcaattcaccagttggccagaccatggggttcctgaagaccctcacctgctcctgaaacttcgacggagagttaatgcttttagcaacttcttcagtggacccattgtggtgcactgcagtgctggcgttgggcgtacaggcacctacattggaattgatgccatgctcgaaagcctagaagcagagggcaaagtggatgtctatggctatgttgtcaacctaaggcgacagagatgtctgatggtgcaagtggaggcccagtacatcctgatccatcaggccttagtggagtacaatcaatttggggaaacagaagtgaacttgtctgagttacattcatgtctacagaatctgaagaagagagatccacccagtgacccgtctcctttggaggctgagtaccagagacttccttcatacaggagctggaggacacagcacattggaaatcaagaagaaaataaaaagaaaaacaggagttctaacgttgttccatatgactttaacagagtgccacttaagcatgaactagagatgagcaaagagagcgaggctgaatccgacgaatcttcagatgaggacagtgactcggaagaaaccagcaaatacattaatgcgtcatttgtgatgagttactggaaaccagaaatgatgattgctgcccagggtccactaaaagagactattggtgacttttggcagatgatattccaaagaaaagtcaaggttattgtgatgttgacagagttaatgagtggagaccaggaagtctgtgctcaatactggggagaaggaaagcagacttatggagacatggaagtaatgttgaaagacacgaacaaatcctcagcctatattctgcgagcatttgaactgagacattccaagagaaaggagcctagaactgtgtaccagtaccagtgtaccacatggaaaggggaggagctccctgcagaacccaaagatctggtgactctgattcagaacatcaaacagaagcttcccaagagtggctcagaagggatgaagtaccacaagcatgcatcaatcctagtccactgcagggatggatcccagcagacggggttgttctgtgctctgttcaatctcctggaaagtgcagaaacagaagatgtggttgatgtttttcaagtggtaaagtctctacgcaaagcacggccggggatggtgggcagctttgagcaataccagttcctctatgacatcatggccagcatctatcccacccagaatggacaagtgaagaaagcaaacagccaagacaaaattgaatttcataacgaagtggacggagccaagcaggacgcaaactgtgttcagccagctgatcctctgaacaaagcccaggaagacagcaaagaagttggagcttcagagcctgcaagtggttctgaggagccagaacattctgcaaatggtcccatgagcccagctctaaccccgagctcataggaacggattcgagtgggacaacgcaaaatgtcaaattagttgtttctatttttctagacctaatgaaaaaatatggctgtacagtggtccgtggaatctgtgttcacctttgccactgtataaaaatatttaagtttgtcaaaaggttttgtacagttttatgcctattttaaaaatgtatctatatcatttagcaagagtgtgtgtaggagagtatgtctgtgtgtgagagagtgtgtgcttctgttagtgtgtgttt

SEQ ID NO: 408 - DNA, 1242 bp, Rattus norvegicus
atgtggctggaacttgtcctggcttcccttctgggctttgtcatctactggtttgtctcccgggacaaggaggaaaccttaccactaggagatggatggtgggggccagggtcaaagccatcagccaaagaagatgagagcatccggcccttcaaggtggaaacatcagatgaggagatcaaggacttacaccagaggatagataggttccgggcatccccacctttggagggcagccgcttccactatggcttcaactccaactacatgaagaaagtggtgtcctactggaggaacgagtttgactggaggaagcaggtggagatcctcaaccagtaccctcacttcaagaccaagatcgaagggcttgacatccacttcatccatgtgaagcctccccagctgccctcagggcgcaccccaaagcccttgctgatggtgcatggctggcctggatccttctatgagttttacaagatcatcccactactgactgaccccaagtcccacggtctgagtgacgagcacgtgtttgaagtcatctgtccctcgattcctggctatggctactcagaggcatccagcaagaaaggtttaaattcggtggccactgcgaggattttctacaagctgatgacacggctgggcttccagaaattctacattcaaggcggggactgggggtccctcatctgcaccaacatggcccagatggttcccaaccacgtgaaaggcctgcacttaaatatggctttcatttcgagaagtttttacaccatgactcctctcctgggccaacgcttcgggagattccttggctacacagagaaggatatcgagctcttgtacccctataaggagaaggttttctacagcatcatgagggagagtggctacttacacatccaagccaccaagccagacactgtgggctgtgctctcaatgactctcccgtgggcctggctgcctacatcttagagaagttctccacctggaccaagtcagagtaccgtgaactggaggatggaggcctggagaggatgaaggtctttgtgcccactggcttttcagccttcccttccgagctactgcatgccccagaaaagtgggtgaaggtcaagtaccccaaactcatctcctattcctacatggaacgtgggggccactttgctgcctttgaagagcccaagcttctggcccaggacatccgcaagttcgtgtccctggctgagctgcagtag

SEQ ID NO: 409 - DNA, 1799 bp, Rattus norvegicus
acccttcagtcgtacagatggcgttctcccagtatatctccttagccccagagctgctactggccactgccatcttctgtttagtgttctgggtgttgagaggcacaaggacccaggttcccaaaggtctgaagagtcctcccggaccctggggcttgcccttcattgggcacatgctgaccctggggaagaacccacacctatctctgacaaagctgagtcagcagtatggggacgtgctgcagatccgcattggctccacacccgtggtggtgctgagcggcctgaacaccatcaagcaggccctagtgaagcagggggatgacttcaaaggccggccagacctctacagcttcacacttatcactaatggcaagagcatgactttcaacccagactctggaccggtctgggctgcccgccggcgcctggcccaggatgccctgaagagtttctccatagcctcagaccccacatcagtatcctcttgctacttggaggagcacgtgagcaaagaggctaaccatctaatcagcaagttccagaagctgatggcagaggttggccacttcgaaccagtcaaccaggtggtggaatcggtggctaatgtcatcggagccatgtgttttgggaagaacttccccaggaagagcgaggagatgctcaacctcgtgaagagcagcaaggactttgtggagaatgtcacctcagggaatgctgtggacttctttccggtcctgcgctacctgcccaacccagccctcaagaggtttaagaacttcaatgataactttgtgctgtctctgcagaaaacagtccaggaacactatcaagacttcaacaagaacagtatccaggacatcacaggcgccctgttcaagcacagtgagaactacaaagacaacggtggtctcatccctcaggagaagattgtcaacattgtcaatgacatctttggagctggatttgaaacagtcacaacagccatcttctggagcattttgctacttgtgacagagcccaaggtgcagaggaagattcatgaggagctggacacggtgattggcagagatcggcagccacggctttctgacagaccccagctgccatatctggaggccttcatcctggagatctaccgatacacatcctttgtccccttcaccatcccccacagcacaacgagggacacctcactgaatggcttccacattcccaaggagtgctgcatcttcataaaccagtggcaggtcaaccatgatgagaagcagtggaaagacccctttgtgttccgcccagagcggtttcttaccaatgacaacacggccatcgacaagaccctgagtgagaaggtgatgctcttcggcttgggaaagcgccggtgcattggggagatcccggccaagtgggaagtcttcctcttcttagccatcctcctgcatcagctggagttcactgtgccaccgggcgtgaaggtggacctgacacccagctatgggctgaccatgaagcccagaacctgtgaacacgtccaggcctggccacgcttctccaagtgaagatggccgagacatcggccgccacccttgttccttttcctttctttttaaataacagctttttcaagatacaattcctccaccatttaattcagctccaatcaattttcaatattgtctacactgttccctgcaaacccatacccattaagatttatgactattcctcctaccctgtttcgcttgctgtgccacgtgctaatctagtttttgactcaatagatttgccaactctggctg

SEQ ID NO: 410 - DNA, 2902 bp, Rattus norvegicus
atactggctcaacctcgggagctcacactcaggctggcgggccatggggcggcgagtcccagctctgagacagctgctggtgctggcagtgctgctgctgaagccttcacagctgcagtcccgagagctgtcagggtcgcgctgccccgagccctgcgactgcgcaccggatggcgccctgcgctgtcctggccctcgagccggcctcgccagactatctctcacctatctccctgtcaaagtaattccatcacaagctttcaggggacttaatgaggtcgtaaaaattgaaatctctcagagtgattccctggaaaggatagaagctaatgcctttgacaacctcctcaatttgtctgaactactgatccagaacaccaaaaacctgctatacattgaacctggtgcttttacaaacctccctcggttaaaatacctgagcatctgtaacacaggcatccgaacccttccagatgttacgaagatctcctcctctgaatttaatttcattctggaaatctgtgataacttacacataaccaccatacccgggaatgctttccaagggatgaataacgagtctgtcacactaaaactgtatggaaatggatttgaagaagtacaaagccatgcattcaatgggacgactctaatctcgctggagctaaaagaaaacatctacctggagaagatgcacagtggagccttccagggggccacggggcccagcatcctggatatttcttccaccaaattgcaggccctgccgagccacgggctggagtccattcagacgctcatcgccctgtcttcctactcactgaaaacactgccctccaaagaaaaattcacgagcctcctggtcgccacgctgacctaccccagccactgctgcgccttcaggaatttgccgaagaaagaacagaatttttcattttccatttttgaaaacttctccaaacaatgcgaaagcacagttagaaaagcagataacgagacgctttattccgccatctttgaggagaatgaactcagtggctgggattatgattatggcttctgttcacccaagacactccaatgtgctccagaaccagatgctttcaacccctgtgaagatattatgggctatgccttccttagggtcctgatttggctgattaatatactagccatctttggcaacctgacagtcctctttgttctcctgaccagtcgttataaactgacagtgccccgcttcctcatgtgtaatctctcctttgcagacttttgcatggggctctacctgctgctcattgcctccgtggactcccaaacaaaaggccagtactataaccacgccatagactggcagacagggagtggctgcggtgcagctggcttctttactgtgtttgccagtgaactctctgtctacaccctgacggttatcaccctggaaaggtggcacaccatcacctatgctgtacagctagaccaaaagctaagactgaggcatgccatcccaattatgctcggaggatggctcttttctacgctgatcgccacgatgccccttgtgggtatcagcaattacatgaaggtcagcatctgcctccccatggatgtggaatccactctgtcccaagtctacatattatccatcttaatcctcaacgtggtggccttcgtcgtcatctgtgcttgctacattaggatctactttgcagttcaaaatccagagctgacagctcctaacaaggacacaaaaattgctaagaagatggccatcctcatcttcacagacttcacgtgcatggcgcccatctctttctttgccatctcggctgccttcaaagtgccccttatcactgtcaccaactcgaaaatcttactggtccttttttatcctgtcaattcttgtgccaatccatttctgtatgcgatcttcacgaaggcgtttcagagagatttccttctgctgctgagccgattcggctgctgtaaacgccgggcggagctttacagaaggaaggaattttctgcatatacttccaactgcaaaaatggcttcccaggagcaagtaagccgtcccaggctaccctgaagttgtccacagtgcactgtcaacagcccataccaccgagagcgttaactcactagcattacaaaattgtgcctaaatatgttttttaaaaagtgttttagaaaaatatttatccttaggcacttcaggagaattgtacctgcttcagaggacggcctataacacttggtcacataagtttcaggaaggtttagaaatttttatagtaatttaggcataataattttttgttgaatctaatactaaggaaatctaagttgtcatttttcacgtctctgacatttttcatttcaatcttgtgatttacattgtaatctccaaatatattacttcatagcagattgaaaatttaaactggtctttgtcctcagatagtttgataaatatattcaagagatgcactgtgcagtgtgactgctagccttgcatggtaaatagaagtttcttagccatattccaagtgcttcacatgtcacactaggaggcacagatgcaaactgtttacatcagtgaattctattagccagctctattctagagacttctatttcccattgacactctgcttaactttccatctgaaggcacatgctgcatatttgtttggcttacagatcatgagtacctcatggccaggagcccatctcagcccatcttgttcctcgtctatctcaggatcttggaaatgctacacagcaagcatgcctagccagttaaactccctaaatctacacaggaaaatatttctaccaccttagcatattgttttcgatgattacatgctttctgtattttgccctcctcctagtatc

SEQ ID NO: 411 - DNA, 2448 bp, Rattus norvegicus
gaattcctcgctctcctcagaccagctcggcctttaggaccttctgtcactcacaggacacaaggaagagctggtcagagctggtgctgggtgaggtaactgagtacagagggagagcaggatctggctgtgggggaggggagttagggaggggagctcagacttgggctgtgagcaggccttctccactggagaagttcagcccagttcccgctgccactgaacagctctcagtccctccccctcctcgcctgccctcttcccttgtcttctgtatctgtctctctgtctctgtctctgtctctgtctctctgagtgtgtgtgtgtgtgtgtatgtgtgtgtgtgtgtttctgtctgactctcttccttcctcccgctgtcttccctccctttccctgtactctgcccaatctccctggttgcctcttctcatttactccatctccttccctgccctcagcaattaccatgttttgctgggtcaaaataacctatctgaagatgttcagcaccggcttgtcagccaaagcttccgacaccctgactacaaaccattcctcatgaggaaccacacccgaaaacctaaggactacagcaatgacctgatgctgctccacctcagcgagcctgcggacatcacagatggggtgaaggtcatcgatctgcccacgaaggagcccaaggtggggagcacctgccttgtctcaggctggggcagcaccaacccctctgagtgtaagtctgagccaggaaacacagctgcgtgtgagggagaggcagagaggacatggctggggtctgctcaccaccctcttgcctcctggtccacaggggaattccctgatgatctccagtgtgtgaacatccacctactgtctaatgagaagtgcatcaaagcctacaaagaaaaggtgacagatctgatgctgtgtgcaggagagttggaaggaggcaaagacacttgcagggtgagacagcatctccctgcagagaggtgaagggctgagagagggaactgaggttctccattcccacttcctcaccctgtctaagcagatgcttcccgtccttccttatggaagtgatgtgagctgggaggggaggatcctgtatctggtactattagtcctctttgagtggcttcagggactggcctgtccacccctcactccctgtatgacctggacacccacgagctgtgttctctcccctactagcccagggctgcctcttagagtctccctttcttcctcccatgaggtcagttccaggttgtgaagtagaacctgacttccaactccttccttactcctgtccctctccttctttcagggtgactcaggaggccccctcatctgtgatggtgtgctccagggcatcacatcatggggctctgtcccatgcggtgaacccaataagccaggcatctataccaaacttattaagttcacctcctggataaaagaagttatgaagaaaaacccctgagtgtcacactgtaccctgatctcaataaaacccaccatgcagcacacatgttcaagttcctgattctctctcgccttctggaggtcaagctgggcgtccacccactacaggtcaggacttccaaagcagatcagcaagggataggggtccatgtatggttggataaagggatggggttgagaaaaaggcagacaaaaggctcagaccaagtcagggatggcacagggttctcctctggaaaagaacacatgcagatctcaaagtttagaaaagttagacacatctgaaatgtcgattccgtctatggccagaccctacaccagaaacaggagggatgacaggcactcggacactgaatttagattgctggcctggttttattgattcggagaaacaggagggggatgggcatgttacataaattaagccttttcttcctggagagttgtctgtccacagaagggtagggactccccccaaggctaggctacagagtatccccctggacccctggagggtatatctctggtagggctggaccaaagatgaagggaggcttaggggcacctgtgtggggcagagcagtgccagcttgggaaaagggccaccttgctccactgcttgggacacaaaccaatgtgtgctcagaaagacatacacacaggtgagagtactggaggactttcagaggagggtccgactcaggcagtaaagactgggccttaaagtggggagtggggcttgccacctgtgtccccagggtgctacctgctctcaggggaagtatgggacctcaggggaggtctgatggaaactgagccacagggaccgaggtagaggatcaggctgcggggactcatcagtgtcctgagaagttgcgtcgtccctctgttggggaggctccaggtagttcacaaagctgcttgcagtagacagcttctgggtcggctccaaagctt

SEQ ID NO: 412 - DNA, 6957 bp, Rattus norvegicus
acggcacccggggctcgtccgccaccgctcttctctgcttctggccaacagctgaagtcacgcagttcctggagtctgaacccaggagacagttcgggacactggggcgttggccccaagctcctcgggctggagaagatctggttcactttctgttgatcccgaaggtggcacaatctattgctgagaagagaacactgcggggcctggagtgggggaatgcaccgtgcccagtgtcctgggcatcagcacgcccaggtcttgcaggcacatctcccagccccaacaagaccaggacacccacctccctgacccaactcctgggcaggcagagagtgaggagtacacagtagaccccgggcattggtgaccacccaaaacccaagggctgcgggctgtagcggctctgttacctaccaccctctggcccctgagcccagaatgcaaggatggccagctcatctctgcccaacctggtccccccgggtccccactgcctgcgccccttcaccccagagtccctggcagccatagagcagcgggcggtggaggaggaggcccggctgcagcggaacaagcagatggagattgaggagcctgagcggaagccacgcagtgacctggaagctggcaagaacctcccactcatctatggggaccccccacccgaagtcattggcatccccctggaggacctggatccttactacagtgacaagaagaccttcattgtgctcaacaaaggaaaggccatcttccgattctctgccacgcctgccctctacctgctgagccccttcagcatcgtcaggagggtggctatcaaggtgctcattcacgcgctgttcagcatgtttatcatgatcaccatcctgaccaactgtgtgttcatgaccatgagcaatccgccttcttggtccaaacacgtggagtacaccttcacggggatctatacctttgagtccctcattaagatgctggcccgaggcttttgcattgatgacttcacattcctccgagacccctggaactggctggacttcagtgtcatcacaatggcgtatgtgacagagtttgtggacttgggcaacatctcagccctgaggaccttccgtgtgctgcgggccctgaagaccatcacggttatcccagggctgaagacaattgtgggagccctgatccagtctgtgaaaaagctgtcggatgtgatgatcctcactgtcttctgcctgagtgtctttgccctggtggggctgcagcttttcatgggaaacctgcgtcagaagtgcgtgcgttggcccccgcccatgaatgacaccaacaccacgtggtatggcaatgacacttggtacagcaatgacacttggtacggcaatgacacttggtacatcaatgacacttggaacagccaggagagctgggccggcaactctacctttgactgggaggcctacatcaatgacgaagggaacttctatttcttggagggctccaatgatgctctgctctgtgggaatagcagtgatgctgggcactgccctgagggctacgaatgcataaaggctgggcggaaccccaactatggctacaccagctatgacaccttcagctgggctttcctggctctcttccggctcatgacgcaggactactgggagaaccttttccagctgaccctacgagctgctggcaagacctacatgatcttcttcgtggtcatcatcttcctgggctccttctacctcatcaatctgatcctggccgtggtggccatggcgtacgctgagcagaatgaggctaccctggccgaagaccaggagaaagaggaggagttccaacagatgcttgagaaatacaaaaaacatcaggaggaactggaaaaggctaaggctgcccaggctctggaaagtggagaggaggcagatggggacccaacccacaacaaagactgcaatgggagcctggatgcatccggggagaaggggcccccaaggccaagctgcagcgcagacagtgccatctcagatgctatggaggagctggaagaggcccatcagaagtgcccaccgtggtggtacaagtgtgcacacaaagtcctcatctggaactgctgtgccccgtgggtgaagttcaaacatataatctacctgatcgtcatggacccctttgtggacctgggtatcaccatctgcattgtgctcaacaccctcttcatggccatggagcactaccccatgaccgagcactttgacaacgtgctctccgtgggcaacttggtcttcacaggcatcttcactgcggagatggtgttgaagctgattgccatggacccctacgagtatttccaacagggctggaacatctttgacagtttcatcgtcaccctcagcctggtggagctgggcctggccaacgtacaggggctgtcagtgctccgttccttccgcctgctgcgtgtcttcaagctggccaagtcatggccaacactcaacatgctcatcaaaatcattggcaactcagtgggcgcgctgggcaacctgaccctggtgctggccatcatcgtcttcatcttcgccgtggtgggcatgcagctgttcggcaagagctataaggagtgtgtgtgcaagatcgcctcagactgcaacctgcctcgctggcacatgaacgacttcttccactccttcctcatcgtcttccgcatcctctgcggggaatggatcgagaccatgtgggactgcatggaggtggccggccaggccatgtgcctcaccgtcttcctcatggtcatggtcattggcaacctggtggtcctgaatctgttcctggctctcctgctgagttccttcagtgctgacagcctggcggcctcggatgaggatggcgagatgaacaacctacagattgccatcgggcgtatcaagtggggcatcggttttgccaaaaccttcctcctggggctgttgcgtggcaagatcctgagccccaaggaaataatactcagcctcggtgagcccgggggtgccggggaaaatgccgaggagagtactcccgaggatgagaagaaggagccgccaccggaagataaggagctgaaagacaatcatatcctgaaccacgtgggcctgaccgatggcccccgctccagcatcgagctggaccaccttaacttcatcaacaacccctacctcaccatccaggtgcccattgcctccgaggagtctgacctggagatgcccacagaggaggagacagacgccttctcggagcctgaggatatcaagaagcccctacagcccctctacgacgggaactcctccgtctgcagcacagctgactacaagccccctgaagaggaccccgaggagcaggctgaggagaaccccgagggggagcagcctgaggaatgcttcacggaagcctgtgtgaagcgctgcccctgcctctatgtggacatctcccagggccgtgggaaaatgtggtggacactgcgcagggcctgtttcaagattgttgagcacaactggtttgagaccttcattgtcttcatgatcttgctcagcagtggagccctggccttcgaggacatctacattgaacagcgacgagtcatccgcaccatcctggaatacgccgacaaggtcttcacctacatcttcatcctggagatgttgctaaagtgggtcgcctacggcttcaaggtgtatttcaccaatgcctggtgctggctcgacttcctcatcgtggacgtctccatcatcagcctggtggcaaactggctgggctactctgagctggggcccatcaaatccctgcgcacactccgggccctgcgacctctgagggcactgtctcgatttgagggtatgagggtggtggtgaacgccctcctgggagctatcccctccatcatgaacgtcctcctcgtctgcctcatcttctggctcatcttcagcatcatgggggtcaacttgtttgctggaaagttctactactgcgtcaacaccaccacctctgagagattcgacatctcggtggtcaacaacaagtccgagtctgagagcctcatgtatacaggccaggtccgctggatgaatgtcaaggtcaactacgacaacgtgggtctgggctatctctccctccttcaggtggccacattcaagggttggatggatatcatgtatgcagctgtggactcccgggagaaagaggagcagccacactatgaggtgaacctctacatgtacctctacttcgtcatcttcatcatcttcggctccttcttcaccctcaacctcttcatcggtgtcatcatcgacaacttcaaccaacagaagaagaagtttggagggaaagacatcttcatgacagaggaacagaagaaatactacaatgcgatgaagaagcttggctccaagaagccccagaagccaattccccggcctcagaacaagatccagggcatggtgtacgacttcgtgacgaagcaggtgtttgacatctccatcatgatcctcatctgcctcaacatggttactatgatggtggagacagatgaccagagccagctcaaggtggacatcctgtacaacatcaacatggtcttcattatcatcttcacaggggagtgtgtgctgaagatgtttgccctacgccattactacttcaccattggctggaacatctttgactttgtggttgtcatcttgtccatcgtgggccttgcgctctctgacttgatacagaaatactttgtgtcacccacgctgttccgtgtgatccgcttggctcggatcgggcgtgtcctgcgtctgatccgcggggccaagggcatccggacgctgctgttcgccctgatgatgtccctgcccgccctcttcaacatcggcctccttctctttctggtcatgttcatctactcgatcttcggcatgtctaacttcgcctacgtcaagaaagagtcaggcatcgacgacatgtttaactttgagacctttggcaacagtatcatctgcctcttcgagatcaccacgtcagccggctgggacgggcttctgaaccccatcctcaacagtgggcccccagactgtgacccgacgttggagaacccgggtaccaatgtcaggggggactgcggcaacccttccatcggcatctgtttcttctgcagctacatcatcatctccttcctcatcgtggtcaacatgtacattgctatcatcctggagaatttcaacgtggccaccgaagagagcagcgagcccctcagtgaggatgacttcgagatgttctatgagacctgggagaagttcgacccggacgccactcagttcatcgactacagccgcctctcggactttgtggacaccctgcaggagccactgaaaatcgccaaacccaataagatcaagcttatcacgttagacctgcccatggtgcccggcgacaagatccactgcttggacatcctctttgccctgaccaaagaggtactgggtgactctggggagatggacgccctcaagcagaccatggaggagaagtttatggcagctaacccttccaaggtctcctatgagcccatcaccaccaccctcaagaggaagcaggaggaggtgtgtgctatcaaaatccagagggcctaccgccgccacctgctgcagcgctccgtgaagcaggcctcttacatgtaccgtcacagccaggacggcaatgacgacggggcccccgagaaggagggattgcttgccaacaccatgaacaagatgtatggccatgagaaagagggtgatggtgtgcagagccagggggaggaagagaaggcctctacagaggatgctggacccaccgtggagcccgaacccaccagcagctcagatactgccctgactccttctcctccaccactacccccctcatcatcaccgccacaagggcagacagttcgcccaggggtcaaagagtctcttgtctagatggcagcgtcaaggctgcacgcagagttggaggggaagggctttgagatgggggctatacaggacttgacacctgggctgaggggtatggaaattgtgctcagggttcaggtgggtcggaagcccctgctgcctgatttcatctttacgatgctctgacattctgttggccaggggaggccaggacatctgaatgctgtttccttcttgggggagagccagcataccttggaggggttggccaccttcctgtcactactttaagggcccaggaccccagctctagccaagacaaagacgaatcttaacccccaaacctacacctgacccccagagcttagctatccctctcgcccccataattctagggtgcagcttccccctgacagctcaggaatgccctgtaaaaggggaaatggttctggtacagaaccaattggccgctggatccggatgtatcaggctggaaacatgacttctgaaacctttcacccagtcagatccaggccggtgggcagctcccctggctggcccctgggggaagaactaaggaaggattgccctgagaaattacctttctctagattgcgtggatgggtcaaacaggctgggtcctgccagctgcattcatgcccttgagcctgagcgcccacatctgcctggggtcaggttggaagctctctatcaagaatcgcccgttcccgcctccctgccttctttctttgaataccagggctcctgggagccccatcaaacacgaaagactgccttcctcctgtctaatctctgccccccccttccctgccccttccctgcttcctcaagtgactctgagaatgctagaactcagcacacgggagatgagttgatactggggcatgcagtgagaaggctcaccaggcttggctttggtcttctcattgcctgaaagcaagttttcccctgagacagggtttcttttctccgtgtagccctggctgcctgg

SEQ ID NO: 413 - DNA, 1658 bp, Rattus norvegicus
aattcgggggaccgtcgccgcgctgaaggtggctctatacctgctcgggtgtgcttcgcgatggcctggaaatccggcggcgccagccactcggagctaatccacaacctccgcaagaatggaatcatcaagacagataaagtatttgaggtgatgctggctacagaccgctcccactatgcaaaatctaacccttacatggattctccacagtcaataggtttccaggcaacaatcagcgctcctcacatgcatgcatatgcactagagctcctgtttgaccagctgcacgaaggcgctaaagcccctgacgtagggtctggaagtggaatcctcaccgcgtgttttgcacggatggttggacacagtgggaaagtcattggaattgatcacattaaagaactagtggacgactcaataactaatgtcaaaaaggatgaccccatgctcctgtcctctgggcgagtacggctggttgtgggcgatggaagaatggggtttgctgaagaagccccttacgatgccattcacgtcggagctgcagccccagttgtgccccaggcattaatagaccagttaaagcctggtggaagattgatattgccagtcggtcctgcaggaggaaaccaaatgttggagcagtatgacaagctacaagatggcagtgtcaaaatgaagcctctgatgggggtgatatacgtgcctttaacagataaagaaaagcagtggtccaggtggaagtgattttctcttctgctctttcttcctccacacattcaagggacgagctgtgagagcaacctgtagcttggccgtctgtaacactgcagtggattgctcatctcggtcctcaaagcattgagagccaacagcatcaccgcttgttttggactttgttacactctcttattttcagcatgaaaatgtgtggtttttgtagggtttcctaattcaaaacggtgcagagccagactgatagaggagggctggagagtgttaactttgtgttgtttaacatgccacatttactttacaaatattaaaagaaagggttctctaaccggaaagcttcgtttgtgacttagtttggaagagtggctttgcttttcttggacacttacttctgttccaatattaatttatgagatttcttttgtgtgtcagataacaccacattcacaagtttagcttttttttctttttttatgtgattttggctagcgagcattattagtgggaggagtcaagttgttagaatgattagtggggtggataatggatcgaggagaatataactagaaatttaggtaattttcgtcattttgtcataggagtgataagcttaataggctcactagaggaaagctgtaggaggtgacattggttcagatttttttgttggctgagagtcatgttagtgggaggagtatgatagatgggaaaataatttttaacattgtagaaggttgaggttttgtacgtagtctgttccgtaagtatttgaaatttttactagtaaggctaaacctacggtctttcgcaggctgcaaaaacatgaatggtaattgggatggttatggagattatggagttggagtttaatgtggatgttgaagttatgacaaatagtgatagtattattccttctccgaaattcc

SEQ ID NO: 414 - DNA, 6586 bp, Rattus norvegicus
  misc_feature (1)..(6586): n = a or c or g or t
ccaagatggcgcccaccgcagtcccgcccgccgcagcctcggcgcctctgcagtccggccgcgcctcccgggccccgcgctagggccgctgccgcctcgcccgccgccgccgccgccagctgacctgtcccggacacataactaacgaagctgctgcaggatgagaagatggcagcgcggctgctcgcaccaccaggccctgatagtttcaagcctttcacccctgagtcgctggcaaacatcgagaggcgtattgccgagagcaagctcaagaaaccaccaaaggcggatggcagccaccgggaggacgatgaagacagcaagcccaagccaaacagtgacctggaggctgggaagagtttgcctttcatctacggggacatcccgcaaggcctggttgcggttcccctggaggactttgacccttactatttgacgcagaaaacctttgtagtattaaacagagggaaaactctcttcagatttagtgccacacctgccttgtacattttaagcccttttaacctgataagaagaatagctattaaaattttgatacactcagttttcagcatgatcatcatgtgcaccatcctgaccaactgtgtgttcatgacctttagtaaccctccagaatggtccaagaatgtggagtacacattcacagggatttacacatttgaatcactagtgaaaatcatcgcaagaggtttctgcatagacggcttcaccttcttgcgagacccgtggaactggttagacttcagtgtcatcatgatggcatatgtgacagagtttgtggacctgggcaatgtctcagcgctgagaacattcagggttctccgagctttgaaaactatctctgtaattccaggcctgaagacaatcgtgggcgccctaatccagtccgtgaagaagctgtcggacgtgatgatcctgacagtgttctgcctgagtgttttcgccctgattggcctgcagctcttcatggggaaccttcgaaacaagtgtgtcgtgtggcccataaacttcaacgagagctacctggagaacggcaccagaggctttgactgggaggaatatatcaacaataaaacaaacttttacatggttcctggcatgctagaacccttgctctgcgggaacagttctgatgctgggcaatgcccagagggattccagtgcatgaaagcaggaaggaaccccaactacggttacaccagctttgacaccttcagctgggccttcttggcattattccgccttatgacccaggactattgggagaacttataccagctgaccttacgagccgctgggaaaacgtacatgatcttctttgtcttggtcatcttcgtgggttctttctatctggtgaacttgatcttggctgtggtggccatggcttatgaggaacagaaccaggcaacactggaggaggcagagcaaaaagaggccgagttcaaggcaatgctggagcaactcaagaagcagcaggaggaggcacaggctgctgcaatggccacctcagcgggcactgtctcggaagacgccattgaagaagaaggggaagatggggtaggctctccgaggagctcttctgaactgtctaaactcagttccaagagcgcgaaggagcggcggaaccgacggaagaagaggaagcagaaggagctctctgaaggcgaggagaaaggggacccggagaaggtgtttaagtcagagtcggaagacggtatgagaaggaaggccttccggctgccagacaacaggatagggaggaagttttccatcatgaatcagtcgctgctcagcattccaggctcgcccttcctctcccgacataacagcaaaagcagcatcttcagcttccggggacccggtcggttccgggaccccggctctgagaatgagttcgcagacgatgaacacagcaccgtggaggagagcgagggccggcgtgactcgctcttcatcccgatccgcgcccgcgagcgccgcagcagctacagtggctacagcggctacagccagtgcagccgctcgtcgcgcatcttccccagcctgcggcgcagcgtgaagcgcaacagcacggtggactgcaacggcgtagtgtcactcatcgggcccggctcacacatcgggcggctcctgcctgaggtgaaaatagataaggcagctacggacagcgcaacgactgaggtggaaattaagaagaaaggccctggatctcttttagtttctatggaccaactcgcctcctacggacggaaggacagaatcaacagcataatgagcgtggtcacaaacacgctagtggaagagctggaagagtctcagagaaagtgcccaccgtgctggtataagtttgccaacactttcctcatctgggagtgtcacccctactggataaaactgaaggagatcgtgaacttaatcgtcatggacccttttgtagacttagccatcaccatctgcatcgttctgaatacgctatttatggcaatggagcaccatcccatgacaccacagttcgaacacgtcttggccgtaggaaatctggtgttcaccgggatcttcacggcggaaatgtttctgaagctcatagccatggacccctactattatttccaagaaggctggaacatttttgacggatttattgtctccctcagtttaatggagctgagtctcgcagatgtggaggggctctcagtgctgcggtctttccgactgctccgagtcttcaagctggccaagtcctggcccaccctgaacatgctgatcaagatcatcgggaactccgtgggtgccctgggcaacctgaccctggtgctggccatcatcgtcttcatcttcgccgtggtggggatgcagctgtttggaaagagttacaaggagtgcgtctgtaagatcaaccaggagtgcaagctcccgcgctggcacatgaacgacttcttccactccttcctcatcgtcttccgagtgctgtgtggggagtggatcgagaccatgtgggactgcatggaggtggccggccaggccatgtgcctcattgtcttcatgatggttatggtcattggcaacctggtggtgctgaatctattcctggccttgcttctgagctccttcagcgcagacaacctggcggccacagacgacgacggggaaatgaacaacctgcagatctcagtgatccggatcaagaagggcgtggcctggaccaaagtgaaggtgcacgccttcatgcaggctcacttcaagcagcgggaggcggatgaagtgaaacccctcgacgagctgtatgagaagaaggccaactgcatcgccaaccacacgggcgtggatatccaccggaacggcgacttccagaagaacgggaacggaaccaccagcggcatcggcagcagcgtggagaagtacatcatcgacgaggaccacatgtccttcattaacaacccaaacctgaccgtccgggtgcccattgctgtgggcgagtctgacttcgagaacctcaacacagaggatgttagcagcgaatcagaccctgaaggcagcaaagataaactggacgataccagctcctcagaaggaagtaccatcgacatcaagcctgaggtggaagaagttcccgtggagcaacctgaggaatacttggatccggacgcctgctttacagagggttgcgtccagcggttcaagtgctgccaggtcaacatcgaggaaggactaggcaagtcgtggtggatcttgcggaaaacctgcttcctcattgtggagcacaattggtttgagaccttcatcatcttcatgattctgctcagcagtggcgccctggcctttgaggacatctacattgagcagaggaagaccatccgcaccatcctggagtatgcggacaaggtcttcacctacatcttcatcctggagatgttgctcaagtggacagcctacggcttcgtcaagttcttcaccaatgcctggtgctggttggacttcctcattgtggctgtctctttagtcagccttatagctaatgccctgggctactcggaactaggtgccataaagtcccttaggaccctaagagctttgagacccttaagagccttatcacgatttgaagggatgagggtggtggtgaatgccttggtgggcgccatcccctccatcatgaatgtgctgctggtgtgtctcatcttctggctgattttcagcatcatgggagttaacctgtttgcggggaaataccactactgctttaatgagacttctgaaatccggttcgaaatcgatattgtcaacaataaaacggactgtgagaagctcatggagggcaacagcacggagatccgatggaagaatgtcaagatcaactttgacaatgtcggagcagggtacctggcccttcttcaagtggcaaccttcaaaggctggatggacatcatgtatgcggctgtagattcccgaaagccagacgagcagcctgactacgagggcaacatctacatgtacatctacttcgtcatcttcatcatcttcggctccttcttcaccctcaacctgttcatcggtgtcatcatcgacaacttcaaccagcagaagaaaaagtttggaggtcaggacatcttcatgacagaggaacagaagaagtactacaatgccatgaaaaagctgggctccaagaagccacagaagcccatcccccgacccttgaacaaaatccaagggattgtctttgatttcgtcactcaacaagcctttgacattgtgatcatgatgctcatctgccttaacatggtgacaatgatggtggagacagacactcagagcaagcagatggagaacattctttactggattaatctggtctttgtcatcttcttcacctgcgagtgtgtgctcaaaatgtttgccttgagacactactatttcaccattggctggaacatctttgactttgtggtggtcatcctctccattgtgggaatgttcctggctgatatcattgagaagtacttcgtctccccaaccctattccgagttatccgattggcccgtattgggcgcatcttgcgtctgatcaagggcgccaaagggatccgcaccctgctctttgccttaatgatgtcgctgcccgccctgttcaacatcggcctcctgctcttcctcgtcatgttcatcttctccatttttggcatgtccaacttcgcatacgtgaagcacgaggccggcattgacgacatgttcaacttcgagacatttggcaacagcatgatctgtttgttccagatcacaacgtctgctggctgggatggcctgctgctgccaatcctgaaccgcccccctgactgcagcttggacaaagagcacccagggagtggcttcaaaggggactgtgggaacccctcggtgggcatcttcttctttgtgagctacatcatcatctccttcctgattgtggtgaacatgtacatcgccatcatcctggagaacttcagcgtggccaccgaggagagcgccgaccctctgagtgaggatgacttcgagactttctatgagatctgggagaagtttgacccagacgccacccagttcatcgagtactgtaagctggcagactttgccgacgccctggagcacccgctccgagtacccaagcccaacaccatcgagctcatcgccatggacctgcccatggtgagcggagatcgcatccactgcttggacatccttttcgccttcaccaagcgagtcctgggagacagtggggagttggacatcctgcggcagcagatggaggagcggttcgtggcatccaatccttccaaagtgtcttacgagcctatcacaaccactctgcggcgcaagcaggaggaggtgtctgcagtggtcctgcagcgtgcctacaggggacacttggctaggcggggcttcatctgcagaaagatggcctccaacaagctggagaatggaggcacacacagagacaagaaggagagcaccccgtccacagcctccctcccctcttacgacagcgtcacaaagccagacaaggagaagcagcagcgtgcggaggagggcagaagggaaagagccaagaggcaaaaagaggtcagggagtccaagtgctagaggaggggaaaggaagcttaccccggctgaacactggcaagtgaaagcttgtttacaaacttccgaatctcacggatgcagagcagctgtgcagacgctcgctgtactggaagacctataccaaacatagtctgcttacatgtgacatggtggcatcctgagcggtgactgctggggacaaaggaccctgctccctggactcacagatctcctatcgcttgggcagacggttactgcatgttccacacttagtcaatgcaacttaggactaaactaaccaggatacaaaaccgaggcggctgccgggaccagcagatcaccgctgcagccaaatggattttattttttcattttgttgattctcagaagcagaaagcatcactttaaaagtttgtttgttcatncaaacaatatttgaattcttacattagttaagctaagcancaaaaag

SEQ ID NO: 415 - DNA, 878 bp, Rattus norvegicus
ggcacgagcagagagattgtcccaacagagaggcaattctattccctaccaacatgaagctgttgctgctgctgctgtgtctgggcctgacactggtctgtggccatgcagaagaagctagttccacaagagggaacctcgatgtggctaagctcaatggggattggttttctattgtcgtggcctctaacaaaagagaaaagatagaagagaatggcagcatgagagtttttatgcagcacatcgatgtcttggagaattccttaggcttcaagttccgtattaaggaaaatggagagtgcagggaactatatttggttgcctacaaaacgccagaggatggcgaatattttgttgagtatgacggagggaatacatttactatacttaagacagactatgacagatatgtcatgtttcatctcattaatttcaagaacggggaaaccttccagctgatggtgctctacggcagaacaaaggatctgagttcagacatcaaggaaaagtttgcaaaactatgtgaggcgcatggaatcactagggacaatatcattgatctaaccaagactgatcgctgtctccaggcccgaggatgaagaaaggcctgagcctccagtgctgagtggagacttctcaccaggactctagcatcaccatttcctgtccatggagcatcctgagacaaattctgcgatctgatttccatcctctgtcacagaaaagtgcaatcctggtctctccagcatcttccctaggttacccaggacaacacatcgagaattaaaagctttcttaaatttctcttggccccacccatgatcattccgcacaaatatcttgctcttgcagttcaataaatgattacccttgcactt

SEQ ID NO: 416 - DNA, 418 bp, Rattus norvegicus
  misc_feature (1)..(418): n = a or c or g or t
gccatggnccttcaccttagggttacccatgatagcagaggcagaggacattggctaccatcagttccggtgctctgttgccgaaaccacagatgcgtggtcttctggccaagcgtctgcgggttcatattgttggcgcattcgctgtggccctaggagttgctgctgcctataagtttggcgtggctgaaccaagaaagaaggcttatgcagatttctacaggaattatgactccatgaaagattttgaagagatgaggcaggctggtgtctttcagagtgcgaagtgatttcagaatgcaaagaattctttggattgtgctccatagaagttcactgctgacctgtgttcctgaactatgaaacgtgaatatgtgggctaaggagtagtttctctcaataaacattaattatatgg

SEQ ID NO: 417 - DNA, 5397 bp, Rattus norvegicus
cccacccagagctgcgggaggaggagaaacgggagacccggccagggaacagcaaccttggtgagctctggactctgcgattgcggacacaggacgggcctgggtgacccggggttgatagtctgcgggccggcacagtgttgcttgcagccgaggcctgtgtgctcttcccaggactgtccccagggccctctaggctggagatctgcggcccgtaagcaccggcgtggaagagaaggacgtgcggcccctagcgcctgcctctccagcgaccttctcgcggagtatgtccccagtgggccggcgtggcgtgctctgatcgccggggtcccagcgctcctactgctatgggctccgggagaggatgtgagacgacggcggtgccgttgctgatggccgtggccgttgctggtggcacagccggccacctgtaccctggagaggtgtgcccgggaatggacatccggaacaacctgaccaggttgcatgagctggagaactgctcggtcattgagggccatctgcagatcctcttgatgttcaagaccagacccgaagatttccgagacctcagtttccccaaactcatcatgatcacagactacctgcttcttttccgtgtctatggcctagaaagtctaaaagacctcttcccaaacctcacagtcatccgaggctcccgtctcttcttcaactatgccctggtcatcttcgagatggtccacctgaaggagctgggtctttacaacctcatgaacatcacccggggctctgtccgcatcgagaagaataatgaactctgctacctggccactatcgactggtcccgcatcctggattacgtggaggacaactacattgtactgaacaaagatgacaatgaggaatgtggggacgtctgtccaggcacagccaagggcaagaccaactgccctgccaccgtcatcaatgggcagtttgtggaacggtgctggacacacagtcattgtcagaaagtttgcccaaccatctgtaagtcacatggctgcacagctgaaggcctgtgctgtcacaaggagtgcctgggcaactgttcagaacccgatgaccctaccaagtgtgtggcctgtcgaaacttctacctggatggtcagtgtgtggagacctgcccaccaccctactatcacttccaggactggcgctgtgtaaacttcagcttctgccaagaccttcactacaaatgcaggaactctcggaagcctggctgtcaccaatacgtcattcacaacaacaagtgcatccccgagtgcccgtctggctataccatgaattccagcaacttgatgtgcaccccgtgtctgggaccctgtcctaaggtctgccaaatcctcgaaggcgagaagaccattgattccgtgacatctgcccaggagctccgaggctgcactgtgatcaatggcagcctgattatcaacatccgagggggcaacaacctggcagctgaactagaggctaaccttggcctcattgaagaaatctcagggttcctaaagatccgtcgctcctatgctctggtgtcactttctttcttcaggaagctacatctgattcgaggagagaccttggaaattgggaactattctttctacgccttggacaaccagaacctgaggcagctgtgggactggaacaagcacaacctcacgatcactcagggcaagctcttcttccactacaaccccaaactctgcctgtctgagatccacaagatggaggaagtgtccggaaccaagggccgccaggagaggaacgacattgccctgaagaccaacggggaccaggcatcctgtgaaaatgaattacttaaattctctttcatccggacgtcttttgacaagatcttgctgaggtgggagccctactggccccccgacttccgagatctcctgggattcatgctgttctacaaagaggccccttatcagaacgtgacagagtttgacgggcaggatgcgtgtggctccaacagctggactgtggtggatattgacccgccccagaggtccaacgaccctaagtctcagaccccaagccaccctgggtggctgatgcggggcctcaaaccctggacccagtatgccatctttgtcaagaccttggttaccttctctgatgaacgccggacctatggagccaaaagtgatatcatctatgtgcaaacagatgccaccaatccttccgttcccctggatcccatatcagtttccaactcctcatctcagattatcttaaagtggaagcccccctcggaccccaatggcaacatcacacactacctggtctactgggagaggcaggcggaggacagtgagctgttcgagttggattattgtctcaaagggctgaagctcccctcacgcacctggtccccaccttttgagtctgacgattctcaaaagcacaatcagagtgagtatgacgactcggccagcgagtgctgctcatgtcctaagactgactctcagatcctgaaggagctggaggagtcttcattcaggaagaccttcgaggattacctgcacaacgtggtttttgttcccagaaaaacctcttcaggcaatggtgctgaggacactaggccatcccgaaagcgaagatcccttgaagaggtgggcaatgtgacagccactacacccacacttccagattttcccaacatctcctccaccatcgcgcccacaagccacgaagagcacagaccatttgagaaagtagtaaacaaggagtcacttgtcatctctggcctgagacacttcactgggtaccgcattgagctgcaggcatgcaatcaggactccccagaagagaggtcaggcgtggctgcctacgtcagtgcccggaccatgcctgaagctaaggcagatgacatcgttggccctgtgacccatgaaatctttgagaacaatgttgtacacttaatgtggcaagagccaaaggaacctaatggtctgattgtgctatatgaagtgagctatcggcgatatggtgatgaggagctgcacctctgtgtctcccggaagcattttgccctggagcggggctgcaggcttcgagggctctctccaggaaactacagtgttcgagtccgggctacctctctggcaggaaatggctcctggacagaacccacctatttttatgtgactgattatttagatgtcccatcaaatattgccaaaattatcatcgggcccctcatcttcgtcttcctcttcagtgtcgtgatcggaagtatttatctattcttgaggaagaggcagccagatgggccaatgggaccactgtacgcttcttcaaacccagagtacctcagtgccagtgatgtctttccatcttccgtatacgttccggatgagtgggaggtacctcgagagaagatcaccctcctccgagagctggggcagggatccttcggtatggtgtacgaaggcaatgccaaggatatcatcaagggtgaggtagagacccgtgttgcggtgaagacggtcaatgagtcagccagtcttcgagaacggatcgagttcctcaatgaggcatcagtcatgaagggcttcacctgtcatcacgtggtccgccttcttggggtggtgtccaaaggccagcccacattggtagtgatggaactgatggctcatggagacctgaaaagtcacctccgttctctgcggcccgatgctgagaacaacccaggccgtcctccccctaccttgcaagaaatgattcagatgacagcagaaattgccgatggcatggcatacttgaacgccaagaagtttgtgcaccgggacctggcagctcggaactgcatggttgcccatgattttactgtcaaaatcggagactttggaatgacgagagacatctacgagacagattactatcggaaagggggcaaggggttgctgcccgtgaggtggatgtcacccgagtccctgaaggacggagtcttcactgcttcttccgacatgtggtcctttggggtggtcctttgggaaatcaccagcctggctgagcaaccttaccaaggcctgtctaatgaacaggtgttgaaatttgtcatggatggaggctatctggatccccctgataactgtccagagagactcactgacctgatgcgcatgtgctggcagttcaaccccaagatgaggccgaccttcctggaaatcgtcaacctgctcaaggacgacctccaccccagctttccggaagtttccttcttctacagcgaggagaacaaggctcccgagagtgaagagctggagatggagttcgaggacatggagaatgtccccttggatcgttcctctcactgtcagagagaagaggctggatgccgcgagggagggtcctctctgagcatcaaacggacctatgatgaacacatcccctacacccacatgaacgggggcaagaagaatgggcgggtcctcaccctgccgaggtcgaacccttcctaacagcgcctgctcgctcggggaaggattcttttcttttctttctttctttttaaaaactcttctgtagtttgactgcctccaggaaactcaggattatcgggactctacccagatgtgaaactgagctcacagatagttcgtacacatttctgtttgtctttggacctgaaaacacacaggtgtggtcgccaaccctgcgagcctgtggagggctaactgtgaacctagaggggttggggtttccatactcccttccctgcccccacggtatcaaaccaagattttattgtttgttgctggtgttttcctcatagattggaaggatgaacctgtttttacagtttttttttttctgctagtgtctgagttatagttagttgtcaaagacagactttatttatggagcacaagtcagaaagcaaagaagaaacagacagaaaaacaaaacaaaaaccaaacctgacctacagaacccagttctggaattgcgtgctttcgcggggttgggctttgagaaggtttcattaatctgagagaaggagcttattttattttagttttgttttatttttttcctcattcacaaaatcagttcctcaaattgaccaatagctgctgctttcatattttattattttgggaaagggtgtgtactcctaagtgtgtgctcatctgcacactgcgtgcatttgcgtgtgtgttgtgtccagggtagcggtcacagggtggggtgggggctgtctgtatgttacatttttctctggattgatgcttggtgacttggctcatgaagcacccgctgcttggagtgggtgacctcatattgtcctcttccttcttatgaaccgagagcttgtgccctcgagagattctcctcagtcacgtcagaactcgctcg

SEQ ID NO: 418 - DNA, 1428 bp, Rattus norvegicus
ccgtctgaccgactccttgggtatattagtgcggcatctgcgtgtaacacgttgcctttattatggtggtctgaggttgttgattgtgaaatccaggatgtaggagctatgttgccgcagcctctgggctccgggatccgagagctcttttgtatcggccggtggaatctttggatgttcgagctgtattgccgcgacctgtagattcagggatcgtttacacttgagaagaactactgaacagcacgtgccagagattgaggtccaggtcaaacgtagaaggacagcctcactgagcaaccaagagtgtcacttgtacccacggcgttctcagcaacagcaaattcctgtggtggatttccaggcagaactgagacaggcgttcttagctgagacaccaagaggtggttaaagcagtattggaacttcaaggtggtggaagtcaacaaacacaggacctatccactgattgtgaaactttggtcaagcttacactgtgttaatagcctgcatcaaacctttatttattgcccttctccaagtattaaggatcttgaaattttagtgttgacaactgctattgtggaacagcaatcatgactgtgggtaagagtagcaagatgctccagcatattgactatagaatgagatgtatcctgcaagatggaagaatcttcattggcacctttaaggcttttgacaagcatatgaatttgatcctctgtgattgtgatgagttcaggaagatcaagccaaagaatgcaaaacagccagaacgtgaagaaaaacgggttttgggtctggtcttgctacgtggagagaacttggtttccatgacagtggagggtccacctcctaaagatactggcattgctcgtgtgccacttgctggtgctgcaggtggccctggtgttggaagagcagctggcagaggagtaccagcaggtgtacctattccccaagctcctgctggattagcaggccctgtccgaggagttggaggcccatcccagcaggtcatgaccccacagggaagaggcactgttgcagctgctgctgttgctgctactgctagcattgcaggagccccaacccagtacccgccaggacggggaactccacctccacctgtaggcagagcaaccccacctccaggcattatggctcctccacctggaatgagaccacccatgggcccaccaattggacttccccctgctcgagggacacctataggcatgccccctccaggaatgagaccccctcctccaggaattagaggcccacctcccccaggaatgcgtccaccaagaccctaagatacagttgataaatctcagcccttctctttccctacaatgcttcttgtgaaattgtgtcgcctgcaagcttttgacccctcttactgcattaactatagataatacc

SEQ ID NO: 419 - DNA, 801 bp, Rattus norvegicus
gtcggctgtgtcaagatgaagctgaatatctccttccctgccactggctgtcagaaactcatagaagtggatgacgaacgcaagcttcgtacgttctatgagaagcgcatggccacagaagtagctgctgatgctcttggtgaagagtggaagggttatgtggtccggatcagcggtgggaatgacaaacaaggttttcccatgaagcaaggcgttttgacccatggcagagtgcgcctgcttttgagtaaggggcattcttgttatagacctaggagaactggagagaggaagcgcaagtctgtccgaggatgcattgtggatgccaacctgagtgttctcaacttggttattgtaaaaaaaggagagaaggatattccaggactgacagataccactgtgcctcgtcggttgggacctaaaagagctagtagaatccgaaagctttttaatctctccaaagaagatgatgtccgccagtatgttgttagaaagcccttaaacaaagaaggtaagaagcccaggaccaaagcgcccaagattcagcgtcttgttactccccgtgtcctgcaacacaaacgccgacgtattgctctgaagaagcaacgcactaagaaaaacaaggaggaggctgcagaatatgctaaacttttggccaagagaatgaaggaagccaaagagaagcgccaggaacagattgccaagagacgtaggctgtcttcgctgagagcttctacttctaaatctgagtccagtcaaaaataagtctttaaagagtaacaaataaataatgagaccttg

SEQ ID NO: 420 - DNA, 905 bp, Rattus norvegicus
ctcttgctctcctccagccacaagtggtctcagaagatgctagaatgtagaggaaacagaagatgaactggcaggttttgcctgtgcgccccttctcagaggatgaacagatcttgtgctatgaagtcctgtgtgctcatccttctcctggccctactgtgtgcagaaagagctcaggggctaaactgctacaattgcacgatgatcccatttggtaatacctgctcatcaactgctacctgcccctaccctgatggagtctgcactattcaggtggcagaagttgttgtgagctctgtaagactgaaagtaaagagcaatctctgccttcccggctgccccaagagtcctcaaacacctgaggtcctcggtaccgttgtccatgtgaatactgactgttgcaatacagatctttgcaacgcagcaggtcccactggaggcagcacgtggaccatggcaggggtgcttctgttcatcctgggctcagtcctcctgcagaccttgctgtgatggaccctccaaggccctgccacccttgtccttttatccttatgtgtaatcactccttcctggagccctctagtgataaattctgagtaataaaaattcagaggggggattgagtgtggaacaccttgttgcaactctatagccactgctggataggttccccactcccctctctagggctttcagatatgtacttcctagaatgccattgtgttttggtttgctgctcttggccctggaggcaggggacagcacggggaagaggcagaaacccaaggcactgtgacaccacctccatccatacataaaaatctggggttctgcagggttcccacacatgcctctgaacatccccctatttgagtccaataaactctctgttctcccacggaatt

SEQ ID NO: 421 - DNA, 660 bp, Rattus norvegicus
atgtctgagactgcccctgctgcgcccgccgcaccggcccccgcagagaagacacccataaagaagaaggcccgcaaggccgcaggtggtgcgaagcgcaaagcgtccggacccccggtgtccgagctcatcaccaaggctgtggccgcctccaaggagcgcagcggcgtgtctctggccgcgctcaagaaagcgctggctgccgccggctacgatgtggagaagaataacagccgcatcaagctcgggctgaagagcctggtgagcaagggcaccctggtgcagaccaagggcaccggcgcctccggctccttcaaactcaacaagaaggcggcttccggcgaagccaagcccaaagcaaagaaggcaggcgcggctaaggcgaagaagcctgcaggcgctgccaagaagcccaagaaggctacgggaacagccactcccaagaagagcactaagaagactccaaagaaagcaaagaagccggctgcagctgcaggagccaaaaaagctaaaagcccgaaaaaagcaaaagctactaaggctaagaaggcccccaagagccctgccaaggcgagagcggtaaagcccaaagcggccaaaccaaaaacctccaagcctaaagcagctaagccaaagaaaacagcagccaagaagaaataa

SEQ ID NO: 422 - DNA, 1770 bp, Rattus norvegicus
ttctgcggtgcctctggtcggtggtcgcccgtgctttcgctttctcagggctgtgagggtgttcgttggaattgtcggtccagtcgtcacttgtcctgagggatcacgatgcgcctcctctctccggttacgggctcgaagctcgtcctgctctttctgttcctgggagcagttcggtccgatgcattgaaacttaatttgacagattcaaagggtacttgcctttatgcagaatgggagatgaatttcacaataacatatgaagctctaaaagtcaatgaaactgtaaccattacagtgcctgacaaggtgacatacaatggaagcagttgtggcgatgataagaatggtgccaaaataatgatacaatatggatccactctctcttgggctgtgaatttcaccaaggaagcatctcagtattttattaacaacatcacgctttcttacaacactaatgataccaaaacatttcctggtgctgtacctaaaggaatccttactgttatcattcctgtgggatcccagcttccattgggtgtcatctttaagtgcagtagtgttttaactttcaacctgagtcctgttgttcagcactattggggcattcacctgcaagcttttgtccaaaatggtacagtgagtaaacatgaacaagtgtgtaaggaggacaaaactgctaccactgtagcacccatcattcacaccaccgtgccatcgcctactacgacactcactccaacttcaatacccgttccaactccaacggttggaaactacaccatttctaatggcaatgctacctgtctgctggctaccatggggctgcagctgaacatcaccgaggagaaggtgcctttcatttttaacatcaaccctgccacaaccaacttcaccggcagctgtcagccccaaacagctcaacttaggctgaacaacagccaaattaagtatctcgactttatctttgctgtgaaaaatgaaaaacggttctatctgaaggaagtgaatgtcaacatgtatttggctaatggctcagctttccatgtttcaaataacaaccttagcttctgggatgctcctctgggaagttcttatatgtgcaacaaagagcaggtggtttccgtgtctcgaacatttcagataaatacctttaacctgaaggtgcaaccttttaatgtgacgaaaggagagtattctacagctcaagactgcagtgcagatgaagacaacttccttgtgcccatagcggtgggagcagccctgggaggagtacttattctagtgttgctggcttattttattggtctcaagcgccatcatactggatatgagcaattttagcacctacaatctgattgaatatattacaaaatacatacaaataacaaagttgtcttacctgtcagtttatgaaacactttgctacttaagacagactccttggaacttttatttggaaatcagtccccacaatttgagataaggctttttttgaaaaaaaacaaaaaacaacaaaaaaacaaaaaacaaaaaaatcattctctgatctgcttaaaatgcagactggctttaaaaaaaggagaaaatgaatacacgtgtgtgatgttttaaggtctgtcttaagaagctttggccaaattgggatcctaacctaaatgccttaaacttattaacatgaccgttataagaaaagatatatggagttgtatcttactggaattaataaacactgcttcaccaccaaaaaaaaaaaaaaaaaaaaaaaaa

SEQ ID NO: 423 - DNA, 936 bp, Rattus norvegicus
gaattccggccgccgccaccgcgccaagttccggccgcggccaccttccgccgtccagggctcctccgcctcggccccgggaccccggctccccgccagccccggccccggcaccatgtcggagaagagcgtggaggcagcggccgagctaagcgccaaggacctgaaggaaaagaaggacaaggtggaggagaaggctggccggaaagaacggaagaaagaagtagtggaggaggaggagaatggagctgaggaggaggaagaagaaactgctgaggatggagaggatgatgatgaaggagacgaagaagatgaggaggaagaggaggaggaggatgaaggccccgtgcggaagagaactgctgaagaggaggatgaagcggatcccaagaggcagaagacagaaaacggggcgtcggcttgagcccctgcccgtgggcttggggatgggaggcccctcaggtcctggaggtggggcaggaacacacaaatccagccccccttctcctggctccctcgtctggccctgccccagagctgtgacccttgccctttgacccagcctctcatttccatctctccagacactgctccttcaccctcactgccacaggtccagcccccaacccgcctcatccaagctccccagccggccctcacttgccctagcattccttgttcttccctgccttcctcaccatcgatctgttccagtccttgcgaagcctctccttcccctctgcaccccgagcctctcagcctgcccttctctctcctgcctgacccctgggtctccctcagattccctcctctcagacagcgccaggccggggtggggctggggttggggccaagccccgaagctgccccctcccctttttgtataatttaataaagaaacggtcgcgcttcaaaaaaaaaaaaaaaacggaattc

SEQ ID NO: 424 - DNA, 4127 bp, Rattus norvegicus
agccgctgctggggaggttggggctgaggtggtggcgggcgacgggcctcgagacgcggagcgacgcggcctagcgcggcggacggccgagggaactcgggcagtcgtcccgtcccgccatggaaatggagaaggaattcgagcagatcgataaggctgggaactgggcggctatttaccaggatattcgacatgaagccagtgacttcccatgcagaatagcgaaacttcctaagaacaaaaaccggaacaggtaccgagatgtcagcccttttgaccacagtcggattaaattgcatcaggaagataatgactatatcaatgccagcttgataaaaatggaggaagcccagaggagctatatcctcacccagggccctttaccaaacacgtgcgggcacttctgggagatggtgtgggagcagaagagcaggggcgtggtcatgctcaaccgcatcatggagaaaggctcgttaaaatgtgcccagtattggccacagaaagaagaaaaagagatggtcttcgatgacaccaatttgaagctgacactgatctctgaagatgtcaagtcatattacacagtacggcagttggagttggagaacctggctacccaggaggctcgagagatcctgcatttccactacaccacctggcctgactttggagtccctgagtcacctgcctctttcctcaatttcctattcaaagtccgagagtcaggctcactcagcccagagcacggccccattgtggtccactgcagtgctggcattggcaggtcagggaccttctgcctggctgacacctgcctcttactgatggacaagaggaaagacccgtcctctgtggacatcaagaaagtgctgttggagatgcgcaggttccgcatggggctcatccagacggccgaccaactgcgcttctcctacctggctgtgatcgagggtgcaaagttcatcatgggcgactcgtcagtgcaggatcagtggaaggagctttcccatgaagacctggagcctccccctgagcacgtgcccccacctccccggccacccaaacgcacattggagcctcacaatggcaagtgcaaggagctcttctccaaccaccagtgggtgagcgaggagagctgtgaggatgaggacatcctggccagagaggaaagcagagccccctcaattgctgtgcacagcatgagcagtatgagtcaagacactgaagttaggaaacggatggtgggtggaggtcttcaaagtgctcaggcatctgtccccactgaggaagagctgtccccaaccgaggaggaacaaaaggcacacaggccagttcactggaagcccttcctggtcaacgtgtgcatggccacggccctggcgactggcgcgtacctctgttaccgggtatgttttcactgacagactgctgtgaggcatgagcgtggtgggcgctgccactgcccaggttaggatttggtctgcggcgtctaacctggtgtagaagaaacaacagcttacaagcctgtggtggaactggaagggccagccccaggaggggcatctgtgcactgggctttgaaggagcccctggtcccaagaacagagtctaatctcagggccttaacctgttcaggagaagtagaggaaatgccaaatactcttcttgctctcacctcactcctcccctttctctggttcgtttgtttttggaaaaaaaaaaaaaagaattacaacacattgttgtttttaacatttataaaggcaggtttttgttatttttagagaaaacaaaagatgctaggcactggtgagattctcttgtgccctttggcatgtgatcagattcacgatttacgtttatttccgggggagggtcccacctgtcaggactgtaaagttcctgctggcttggtcagcccccccacccccccaccccgagcttgcaggtgccctgctgtgaggagagcagcagcagaggctgcccctggacagaagcccagctctgcttccctcaggtgtccctgcgtttccatcctccttctttgtgaccgccatcttgcagatgacccagtcctcagcaccccacccctgcagatgggtttctccgagggcctgcctcagggtcatcagaggttggctgccagcttagagctggggcttccatttgattggaaagtcattactattctatgtagaagccactccactgaggtgtaaagcaagactcataaaggaggagccttggtgtcatggaagtcactccgcgcgcaggacctgtaacaacctctgaaacactcagtcctgctgcagtgacgtccttgaaggcatcagacagatgatttgcagactgccaagacttgtcctgagccgtgatttttagagtctggactcatgaaacaccgccgagcgcttactgtgcagcctctgatgctggttggctgaggctgcggggaggtggacactgtgggtgcatccagtgcagttgcttttgtgcagttgggtccagcagcacagcccgcactccagcctcagctgcaggccacagtggccatggaggccgccagagcgagctggggtggatgcttgttcacttggagcagccttcccaggacgtgcagctcccttcctgctttgtccttctgcttccttccctggagtagcaagcccacgagcaatcgtgaggggtgtgagggagctgcagaggcatcagagtggcctgcagcggcgtgaggccccttcccctccgacacccccctccagaggagccgctccactgttatttattcactttgcccacagacacccctgagtgagcacaccctgaaactgaccgtgtaaggtgtcagcctgcacccaggaccgtcaggtgcagcaccgggtcagtcctagggttgaggtaggactgacacagccactgtgtggctggtgctggggcaggggcaggagctgagggtcttagaagcaatcttcaggaacagacaacagtggtgacatgtaaagtccctgtggctactgatgacatgtgtaggatgaaggctggcctttctcccatgactttctagatcccgttccccgtctgctttccctgtgagttagaaaacacacaggctcctgtcctggtggtgccgtgtgcttgacatgggaaacttagatgcctgctcactggcgggcacctcggcatcgccaccactcagagtgagagcagtgctgtccagtgccgaggccgcctgactcccggcaggactcttcaggctctggcctgccccagcacaccccgctggatctcagacattccacacccacacctcattccctggacacttgggcaagcaggcccgcccttccacctctggggtcagcccctccattccgagttcacactgctctggagcaggccaggaccggaagcaaggcagctggtgaggagcaccctcctgggaacagtgtaggtgacagtcctgagagtcagcttgctagcgctgctggcaccagtcaccttgctcagaagtgtgtggctcttgaggctgaagagactgatgatggtgctcatgactcttctgtgaggggaacttgaccttcacattgggtggctttttttaaaataagcgaaggcagctggaactccagtctgcctcttgccagcacttcacattttgcctttcacccagagaagccagcacagagccactggggaaggcgatggccttgcctgcacaggctgaggagatggctcagccggcgtccaggctgtgtctggagcagggggtgcacagcagcctcacaggtgggggcctcagagcaggcgctgccctgtcccctgccccgctggaggcagcaaagctgctgcatgccttaagtcaatacttactcagcagggcgctctcgttctctctctctctctctctctctctctctctctctctctctctctctctaaatggccatagaataaaccattttacaaaaataaaagccaacaacaaagtgctctggaatagcacctttgcaggagcggggggtgtctcagggtcttctgtgacctcaccgaactgtccgactgcaccgtttccaacttgtgtctcactaatgggtctgcattagttgcaacaataaatgtttttaaagaac

SEQ ID NO: 425 - DNA, 1595 bp, Rattus norvegicus
aggacaaacatcgatcagggtcaaattgacaataaaagggctggagcaagcaacagggactcaccaaccaggcctcgcctctgagttcagcccagagctagctgggaaatgttccggatgttggccaaggccagtgtgacgctgggctccagggcagcaagttgggtacggaacatgggctcgcaccagctgctggtgccacccccagaggccctgagcaagcccctgtcaattcctaagaggctcctgttgggtccgggaccctccaacctggctcctcgtgtgctagcagctggaagtctgaggatgattggccacatgcaaaaagagatgtttcagatcatggatgagatcaagcagggcatccagtatgtgttccagaccaggaaccccctcacactggttgtcagcggctcaggacattgtgccatggagactgccctgttcaacctcctggagcctggggactcctttcttgtgggaaccaatggcatctgggggatacgggctgcagagatcgctgagcggattggagcccgtgtgcaccagatgatcaagaagcctggagaacattacacactgcaggaggtggaggagggcctggctcagcataaaccagtgttgctgttcctgacccacggggagtcatccactggtgtgctgcagcccctggatggtttcggggagctctgccacaggtatcagtgcctactcctggtggactcggtggcatcattgggcggagtccctatctacatggaccaacaaggcatcgacatcttgtactctggctctcagaaggtcctgaatgccccaccagggatctccctcatctccttcaacgacaaggccaaatccaaagtctactcccggaagacaaagccagtctccttctacacagacatcacttatttgtccaagttgtggggctgtgagggcaagaccagagtaattcatcatacgttgcctgtcatcagcttatactgcctgagggagagcctagcactcatttcagagcagggcctggagaattcctggcggcgtcacagggaggctacagcacatctgcacaagtgcctgcgggagttgggcttaaagttctttgtgaaggacccggaaatccggctacctacaatcaccaccgtgaccgtgcctgccggctacaactggagggacatcgtcagctacgtgctggaccacttcaacattgaaatctctggtggtcttgggccctctgaggataaggtgctgcggattggcctcctgggctacaacgccaccacagagaatgcggaccgtgtagcggaggccctgagggaggccctgcaacattgtcctaagaataaattgtgagcatcgtctcaccagactgtgccctcctggaggggctgggaatatagcaggaacgagaagactgtgcaagccctccagccagcaaaggctgccgatgtaaccaggcgggaagggtcagggcgaagctgcccctctccccacagatggagccctgtggtcacatgatgctaatcaccttccgatgaagctgcattctgcaggccactggacttcgggaatattcaataaagtacttgccagac

SEQ ID NO: 426 - DNA, 1838 bp, Rattus norvegicus
gaatccaacaggcaaggcgggtgagggctcgtccccaccctgagcccgaattttccgaggctccaggcagtacttggctagcctgctgcccgtgggtcagcaaactcggagtcccaggagaagatctctgcgaagggaactcggaggatcaggacggccacagactttgcgagacagggacacacactggtgagctcccaacaggagcctggactcctcactcctgaagatggctggaaactgctcatgggaagctcactccaccaaccagaacaagatgtgtcctggtatgagcgaggctctggaactctacagcagaggcttcctgaccattgaacagattgccacactccctccaccagccgtcacaaactacatcttcctgctgctttgcctgtgtggcctggtgggaaacgggctggtcctctggttttttggcttctccatcaagaggacccccttctccatctacttcctgcacctggccagcgctgatgggatatacctcttcagcaaggccgtgattgctctcctgaacatggggaccttcctgggctccttccccgactacgttcgaagagtgtcccggatcgtgggtctctgcacattcttcgccggtgtgagcctccttccggccattagcatcgaacgctgtgtgtccgtcatctttcccatgtggtactggcgtcggaggcccaagcgcctgtccgctggggtctgtgccttgctctggctgctgtccttcctggtcaccagtatccacaactacttctgtatgttcctgggccatgaggcctctggaacagcctgcctcaacatggacatctccctgggcatcttgcttttctttctcttctgcccactcatggtactcccctgcctggcactcatcttgcatgtagagtgccgagcccggcgccgccaacgctctgccaagctcaatcacgtggtcctggccatcgtctctgtcttcctcgtgtcatccatttatttggggatcgactggttcctcttctgggtcttccagatcccggcccccttcccggagtacgtcactgacttatgtatctgcatcaacagcagtgccaagcccattgtctacttcctggctgggagagacaagtcccagcgcctgtgggaacctctcagggtggtcttccagcgggccctccgagatggtgccgagccaggggacgctgctagcagcacacccaacacggtcaccatggagatgcagtgcccctctgggaacgcatcatgagaggccaatgtctggggcaaggctgctgcagagagcagccagtagcttccagagacactctgcccgagggcaggagcggggcagctgcccctgtgccgccagggagaagacctgccttcacacaaggcatctgcttgtcaggtgtggccaaggggctgagcagccatctctagacagaccctgtggcctctgctccccaattatctgcttctgtgactcagtgtaccaaagtttccctcaccagtatggtagggtcccctcctcaacagaagctcatgaacgaaggcaacaaggaggtcacctcctcaaatgtgactcagtcagcacaagactcactgggccagcagcctcatctagaatctgagaaccgtgttagcatcagctggggtcagggctctttctgctctggcttctgctgggtttgtcattccgtagacagggacccagcagactccacctcctgggtagctaacagaaacaggcccaggaacaggtctagctgagggccagagaagggcaagtaggcttacacatatgtcccctttgacctacgagatgtgtcctggtatgagcgagg

SEQ ID NO: 427 - DNA, 2992 bp, Rattus norvegicus
aattcggcacgagctcggctccccttccaagagaaacaagagaaacctcacggaaggaagggaggaaggaaagaagcaagcaaggaactgcaggaagaaaagagccggcagagcatcaagaagaatcgaagggaggggagggaagaccaaatctatggttggaccagggcttctttttcgccaatgtaaaaaggaatatgccgtacatctttgcctttttctgcaccggttttctaggtgcggttgtgggtgccaatttccccaacaatatccagataggggggttatttccaaaccaacaatcacaggaacatgcggcttttaggtttgctttgtcacaactcacggagccccccaagctgcttccccagatcgatattgtgaacatcagcgacagctttgagatgacttaccgtttctgttcccagttctccaaaggagtctatgccatctttggattttatgaacgaaggactgtcaacatgctgacctccttctgtggggccctccatgtgtgcttcattactccaagttttcctgttgacacatccaatcaatttgtccttcagctacgcccggaactacaggaagctctcattagcattatcgaccattacaagtggcaaacctttgtctacatttatgatgctgaccggggcctgtcagtcctgcagagagtcttggatacagccgcagagaagaactggcaggtaacggctgtcaacattctgacaaccaccgaggaaggataccggatgctctttcaggacctggagaagaaaaaggagaggctggtggtggttgactgtgaatcagaacgcctcaacgccatcctgggccagatcgtgaagctagaaaagaatggcatcgggtaccactacatcctcgccaatctgggcttcatggacattgacttaaataagttcaaggagagcggagccaatgtgacaggtttccagctggtgaactacacagacacgatcccagccagaatcatgcagcaatggaggacaagtgactcccgagaccataccagggtggactggaagaggccaaagtacacttctgctctcacctatgatggtgtcaaggtgatggctgaggccttccaaagcctgcggaggcagaggattgacatatcccgccgggggaatgctggggactgtctggctaacccagctgtgccctggggtcaagggatcgacatccagagagccctgcagcaggtgcgcttcgaaggtttgacaggaaatgtgcagttcaacgagaaagggcgccggaccaattacaccctccacgtgatcgaaatgaaacatgatggaatccgaaagattggttactggaatgaagacgataaatttgtccccgcagccaccgacgctcaggctggaggggacaactcaagcgtccagaataggacctacatcgtcactactatcctcgaagatccttacgtgatgcttaaaaagaatgccaaccagtttgagggcaatgaccgctatgagggctactgtgtggagctggctgcagagatcgccaagcacgtgggctactcctaccgacttgagattgtcagcgacggcaaatatggagcccgggatcccgacacaaaggcttggaatggcatggtgggagaactggtctatggaagagcagacgtggctgtggctcccttgaccataaccttggtccgggaggaagtcatcgacttctccaagccattcatgagtttgggaatctccattatgattaagaagccacagaagtccaagccaggtgtcttctcctttcttgaccctttggcctatgagatctggatgtgtatagtgtttgcctacattggagtgagcgtcgtcctcttcctggtcagccgtttcagcccctacgaatggcacagcgaagagtttgaagagggacgagaccagacaaccagtgaccagtcaaatgagtttggcatattcaacagcctgtggttctccctgggggccttcatgcagcaaggatgtgacatttcccccaggtccctgtccggacgcatcgtcggcggcgtctggtggttcttcactttgatcatcatctcctcgtacacagccaacctggctgccttcctgactgtggagaggatggtgtctcccattgagagtgcagaggacctggcaaagcagacggaaattgcttatgggacattggaagcaggctccactaaggagttcttcaggagatctaaaatcgctgtgtttgagaagatgtggacatacatgaagtctgcagaaccatccgtgtttgttcggaccacagaggaaggcatgatcagagtgagaaaatctaaaggcaaatacgcctacctcctggagtccaccatgaatgagtatattgagcaacgaaagccctgtgacaccatgaaagtgggaggtaacttggattccaaaggctatggcattgcgacacccaaggggtccgccctgagaaatccagtaaacctggcagtgttaaaactgaacgagcaggggcttttggacaaattgaaaaacaaatggtggtacgacaagggcgagtgcggcagcgggggaggtgactccaaggacaagaccagcgctttgagcctcagcaatgtggcaggcgtgttctacatcctgattggagggctgggactggccatgctggttgccttaatcgagttctgctacaaatcccgtagcgagtcgaagcggatgaagggtttctgtttgatcccacagcaatccatcaatgaagccatacggacatcgaccctcccccggaacagtggggcaggagccagcggaggaggcggcagtggagagaatggccgggtggtcagccaggacttccccaagtccatgcaatccattccctgcatgagtcacagttcagggatgcccttgggagccacaggattgtaactggagcagacaggaaacccttggggagcaggctcaggcttccacagccccatcccaagcccttcagtgcc

SEQ ID NO: 428 - DNA, 393 bp, Rattus norvegicus
atgatgaagtcgatccagctttgcatcctactctggtgcttgagagcagtctgctgccatagctgtgaactgaccaacatcaccatctcagtagagaaggaagagtgccgtttctgcataagcatcaataccacttggtgtgagggctactgctacaccagggatctggtgtataaggacccagctagaccaaacacccagaaagtatgcaccttcaaggagctggtgtacgagaccataagattgcctggctgtgcccgccactcagactccctctacacatatccagtagccactgaatgccactgtggcaagtgtgatagtgacagcaccgactgcactgtaagaggcctgggacccagctactgctccttcggtgaaatgaaagaataa

SEQ ID NO: 429 - DNA, 315 bp, Rattus norvegicus
actggggttctgttctgttcagctcctgggcggcgcagcggacgacaaacttacagccggtatcagaccttggaactagagaaggagtttctctttaatccttatttgaccagaaagcgccggatcgaagtctctcacgccctgggactcacggaaagacaagtgaagatttggttccagaatcgaaggatgaagtggaaaaaggagaacaacaaggataaacttcctggggcccgagatgaggagaaggtggaagaagaagggaatgaggaagaggagaaggaggaggaggaaaaggaagaaaataaggactaa

SEQ ID NO: 430 - DNA, 2300 bp, Rattus norvegicus
ggaattctgacagtatcggctgctctttgtcaataaacagggcactacctgtattgatctctgcctggtcctctggctggctgagcctctgtaggaggtgcccaaagccctggtggatttcttcctcagtgatctctgtgagattgaacttgagaccttctagaatctcttccatggtgctgtcttttgctcccagagacaaaatggccaaggcagctgagatgctaagaggggagaagacaacatttttatctggattcctcaaagccagcttcttgtagaggctcaatggttatgaaaggatctcgcttgtcctctatcggcccgccccgggatcacctctgcctttaaagtcgccaggtcgcgcaaagctggagttctgcctccttgcctggatggggcgcgtagtctctggctctaaactcttggcttctcagacacgatctatggctgtgttgagccgcatgagactgagatgggcgcttctggacactcgtgtgatgggccatggcctctgcccacaaggggccagagccaaggccgcgatccctgcagccctccgggatcacgagagcacggagggtccaggaacaggtcaagaccgaccgcgcctgcggagtctggcggagcttccgggacccggaacgctacgctttttattccagctatttctacgaggctatgtgctgcacttgcacgagctccaggcgctgaacaaggccaagtacggcccaatgtggacaaccacctttgggactcgcaccaatgtgaatctggctagcgccccgctcttggagcaagtgatgagacaggagggcaagtaccccataagagacagcatggagcagtggaaggagcaccgagaccacaaaggcctctcctatgggatcttcatcacacaaggacagcagtggtaccatctgcgtcatagtttgaatcagcggatcgtgaagcctgctgaggcagccctctacacagatgccttaaacgaggtcatcagtgactttattgcccggctggaccaggtgcggacagagagtgcatcaggggatcaggtgccagatgtggccaatcttctctaccaccttgccttggaagccatctgctatatcctgtttgagaaaagggttggctgcctggagccctccatccctgaggacaccgccaccttcatcagatctgttggactcatgttcaagaactcagtctatgtcactttccttcccaagtggtctcggcctctgctgcccttttggaagcgatacatgaataactgggataacattttctccttcggggagaagatgattcatcaaaaagtccaggagatagaagcccagctacaggcggctgggccagatggggtccaggtatctggctacctgcacttcctgctgactaaggaattgctcagtcctcaagagactgtcggcacctttcctgagctgatcttggctggggtagacacgacatccaatacactgacctgggccctgtatcacctttcaaagaacccagagatccaggaagccttgcacaaggaagtgactggtgtggtacccttcgggaaggtgccccagaacaaggactttgcccacatgcccctgctaaaagctgtgattaaggagaccctgcgcctctaccctgtggttcccacaaactcccggatcatcacagaaaaggaaactgaaattaatggcttcctcttccctaagaatacacagtttgtgttatgccactacgtggtgtcccgagatcccagtgtctttcctgagcccgagagcttccagcctcaccgatggctgaggaagagagaggacgataactccgggatccaacacccatttggctctgtgccctttggctatggggttcggtcctgcctgggtcgcaggattgcagaactggagatgcaactcctgctgtcaaggctgatacaaaagtatgaggtggtcctgtctcccgggatgggagaagtgaagtctgtgtcccgcatcgtcctggttcccagcaagaaggtgagcctacgctttctgcagagacagtagtaccaagctgggctcctgtctccatgggacttgtcagaagccctggcacagaagttcttggccagtctcacgtcacatgtcacgatgccagattcaacaggggacctctctgcccttcccatagacaccagacgtctggcacaatctctactgagcagcacccatttaagacattagagcacctcatatcacaggacggtgcttgggtacaatttaaaataaaatttaaaattcaaattttaaaaaaaaaaa

SEQ ID NO: 431 - DNA, 2360 bp, Rattus norvegicus
gcacagacaatagtgagtaagaagcccggctgccttccggtctcctctttctgtctgcaagccaagtcaagaaagatgatggagcccagtgaataccatgaataccaagctagagggaaagagatggtggattacatctgccagtacctgagcaccgtgcgggagaggcaggtgaccccaaatgtgaagcctgggtacctgcgagcccagataccttcaagtgctcctgaggaacccgacagctgggatagcatctttggggacattgagcaaatcatcatgcctggggtggttcactggcagagcccccacatgcacgcctactatccggctctcacctcttggccatccctgctaggagatatgctggctgatgccatcaactgcttggggttcacgtgggcttccagcccggcctgcacagagctggagatgaacatcatggactggctggcgaagatgctggggctcccggacttcttcctgcaccaccatcccagcagccaggggggaggcgtcttgcagaggactgtcagcgaatccactttaattgccctgctggcagcaaggaagaacaaaatcctagaaatgaaagcgcatgagcccaatgctgatgagtcctctctgaacgctcgtcttgttgcctatgcctctgaccaggctcactcttcagtggagaaggctggcttgatttcccttgtgaagatcaaatttctgcctgtggacgacaacttctcactccgaggagaagctctccagaaggccatcgaggaagacaagcaacagggcttggtgcctgtgtttgtctgtgcaaccttagggaccactggagtctgtgcatttgacaagctgtcagagctggggcccatctgtgccagggagggactgtggctccacgtcgatgctgcttatgcaggaacagcctttctgcgccctgagctccggggcttcctgaagggcattgagtacgccgactccttcacctttaacccttccaagtggatgatggtgcactttgactgcactgggttctgggtcaaggacaagtacaagctacagcagaccttcagtgtgaaccccatctacctcagacatgcgaactctggtgtcgccactgacttcatgcattggcagatccccttgagccggcgctttcgctccattaagctgtggtttgtgattcggtccttcggggtgaagaatcttcaagcacatgtcagacacggtacagacatggctaaatactttgaatctctagtcaggagcgaccctgttttcgaaattcctgctgagaggcaccttggtctggtggtttttcgtctgaagggtcccaactgtctcacagaaagtgtgttaaaggaaatagccaaaactggccaggtcttcctcatcccagccactatccaggacaagctgatcatccgtttcaccgtgacgtcccagttcaccaccaaggatgacatcctgagagattggaacctcatccgagaggctgctaaccttgtcctgagccagcactgcacttctcagccgagccctcgggccaagaaccttattccaccgccggtgaccagagactccaaagacctgaccaatgggctatccctggagtctgtcaatgagggaggagatgacccagtacaggtccggaagatcttcaggctgccaggagacagtctggaaacgacaatggatccctttgatgattgcttctcagaagaggcctccgataccaccaagcacaagctgtcgtcctttctgttcagttacttgtcggtacagaacaagaagaagacaatgcggtccctcagctgcaacagtatgcctatgagtgcccagaagtcacctcccccagatgcttccgtgaagcatgggggcttcttccgggccagaatcttttctgggttcccagaagaaatgatgatgatgaagaaaggtggcttcaaaaagctgatcaagttctacagtgttcccagctttcctgaatgcagctctcagtgtggtaccctccagctgccctgctgccctctgcaggccatggtgtaggtgacgggagtcttcaatcagaatgcaagggtgtgcttcagggagttcgggaacccttgaaattgtgtgcagtttgtgtgcttattatgtatgtgtgtgcatcttgagggaagtaagcccataattttgatcatagcctcacaggggttcatgacccacaatagattggaattgggcagtttaagctggcatgcttcagagggttgcaggggcttgtgtgacagaaggggctgagagagcagtgtcctgttaagcttgtaatgtaaaaaacaacctagaaataaattgtgcctatatctaaaaaaaaaaaaaaa

SEQ ID NO: 432 - DNA, 2142 bp, Rattus norvegicus
atggtgaaactcgcaaaggccggcaaaacccacggagagtccaagaaaatggctcctcctccaaaggaggtggaagaagatagtgaggatgaagaaatgtcagaagatgaagatgacagcagtggagaagaggaggttgtcatccctcagaagaaaggcaaaaaggctaccacaactccagcaaagaaggtggttgtttcacaaacaaaaaaggctgcagttcccacaccagctaagaaagcagctgttaccccaggcaaaaaggcagcagccacaccagccaagaaagctgttacaccagccaaagtagttccaacacctggtaaaaagggagctgcacaagcaaaagcattggtaccaactcctggtaaaaagggagctgtcactccagccaagggggctaagaatggtaagaatgccaagaaggaagacagcgatgaggatgaagatgaagaggatgaagatgacagcgatgaggatgaagatgaagaggatgaatttgagccaccggtagtaaaaggagtgaaaccagcaaaagcagctcctgctgctcctgcctcagaggatgaggatgaggaagatgatgatgatgaagatgatgatgatgatgatgaagaggaggaggaggaagatgactctgaggaagaagttatggagatcacaccagccaaaggaaagaaaactcctgcaaaagttgttcctgtgaaagccaagagtgtggccgaggaggaggaagatgatgaggatgatgaagatgaagaggaggatgaagatgaagaagatgaagaggacgatgaagatgaggatgaggaagaagaggaagaacctgttaaagcagcacctggaaaacggaagaaggagatgaccaagcagaaagaagcccctgaagccaagaaacagaaaatagaaggctcagaaccaactacacctttcaacctgttcattggaaaccttaatccaaacaagtctgttgctgaattaaaagttgccatcagtgaactttttgctaaaaatgatcttgctgctgtggatgtcagaactggtacaaataggaaatttggttatgttgattttgagtctgctgaagacctagaaaaggccctggagctcactggtttaaaagtgtttggcaatgaaattaaactagaaaaaccaaaaggaagagatagtaagaaagttcgagctgcaagaacacttttagccaaaaacctctctttcaacatcactgaggatgaattaaaagaagtgtttgaagatgctgtggagatcagattagtcagccaggatgggagaagtaaagggattgcttatattgaatttaagtctgaggctgatgcagagaaaaacttggaagaaaagcagggggcagaaattgatggacggtctgtttcactctactacactggagagaaaggacaaaggcaagagagaactggaaagaatagcacttggagtggtgaatcaaagactttggttttaagtaacctttcctacagtgcaacagaagaaacacttcaggaagtattcgagaaagcaacctttattaaagtgccccagaacccacatggcaaatctaaagggtatgcatttatagaatttgcttcatttgaagatgctaaagaagctttaaattcctgtaataaaatggaaattgagggcagaacaatcaggctggagttgcaaggacccaggggatcacctaatgcgagaagtcagccatccaaaactctgtttgtcaaaggtctgtctgaggataccactgaagagaccttaaaagaatcatttgagggctctgttcgtgcaagaatagtaactgatcgggaaactggttcttctaaagggtttggttttgtagactttaatagtgaggaagatgccaaagctgccaaggaggccatggaagatggagaaattgatggaaacaaagttaccttggactgggccaaacctaagggtgaaggtggctttggtggtcgaggtggaggcagaggaggtttcggaggcagaggtggtggcagaggcggaagaggcggatttggcggaagaggccggggagggtttggaggcagaggaggcttccgaggcggcagaggaggcgggggagacttcaagccacaaggaaagaagacgaagtttgaatag

SEQ ID NO: 433 - DNA, 2335 bp, Rattus norvegicus
ctccagtggctgagtgatcaactatactcgatgtatcttccagggcttctgcagaagtgcaagatgtcttcatgacctacaccgtgtatgatgacatcatcaccattaagctcatccaagaagcctgcaaggttctggatgtgtccatggaagccattctgaagctctttggcgaatacttctttaagttctgtaagatgtctggctatgacaggatgctgcggacacttggaggaaatctcaccgagtttattgaaaacctagatgcactccacagttacctggcactgtcctatcaggaaatgaacgcaccatcctttcgagtggaggaaggagctgacggggcgatgcttctccactactactcagacagacatggtctgtgtcacattgtaccaggtatcattgaagctgtggccaaggacttctttgacactgatgtggccatgagtatcctggatatgaacgaagaggtggaaaggacagggaagaaagaacatgttgtgtttctggtcgtgcagaaggctcacagacagataagaggagcaaaggcaagccggccacaaggcagtgaggacagccaggcagaccaggaggctctccagggaacactccttcggatgaaggagagatatttaaacatccctgtttgccctggggagaaatctcactcaactgctgtgagggcatcggtcctttttggaaaagggcccctcagggacaccttccagcccgtctatcctgagagactatgggtcgaagaggaggtgttctgtgatgcttttcctttccacattgtctttgatgaagcactaagggtcaagcaagctggagtgaatattcagaagtatgtccctggaatcttaacccagaagtttgcactagatgagtatttttccatcatccaccctcaagttactttcaacatctccagcatctgcaagttcattaacagtcagtttgtcttgaagacaagaaaagaaatgatgcccaaagcaaggaagagccagccgatgctcaaactccggggtcagatgatctggatggagtctctgaggtgcatgatcttcatgtgttccccaaacgtccgcagcctgcaagagctggaagagagcaagatgcatctttctgatatcgctccgcacgacacgaccagggatctcatcctcctcaaccagcagaggctggcagagatggagctgtcctgccaactggaaaagaagaaggaggagttgcgtgtcctttccaatcacctggccatcgagaagaagaagacagagaccttgctgtatgccatgctgcctgaacatgtggccaaccaactcaaggagggcagaaaggtggctgcaggagaatttgaaacatgtacaatccttttcagcgatgttgtgacatttaccaacatctgtgcagcctgtgaacctatccaaatcgtgaacatgctgaattcaatgtactccaagtttgacaggttaaccagtgtccatgatgtctacaaagtagaaacaataggggatgcttacatggtggtgggtggagtaccagtacccgttgaaagccatgctcaaagagtcgccaattttgctctggggatgagaatttctgcaaaagaagtgatgaatcctgtcactggggaacctatccagatcagagtgggaatccacactggaccagtcttagcaggtgttgtgggagacaagatgcctcggtactgcttgtttggtgacactgtaaacacagcctctaggatggaaagtcacgggcttcccagcaaagtgcatctgagccccacagcccacagagccctgaaaaacaaagggtttgaaattgtcaggagaggcgagatcgaagtgaaggggaaaggaaagatgaccacatactttctgatccagaacctgaatgccaccgaggatgagataatggggcgaccttcagcccccgctgatgggaaggaagtatgtactcccggaaaccaagtcaggaagtcccctgctgtcccgaggaacacagaccatcagcaacaagtctacaaaggagacccagcagacgcttctaatgaagtcacacttgctgggagcccagtggcagggcgaaactccacagatgcagtcaataaccagccatcaccagatgagaccaagacaagtgtcgttgctagtggccctgtgctgtctgctttctgtgttgtgctgtgatcacgagaaaaagtgatcctatgggatccatttcctgtattccatggcagcaaagggaattaatttataaaaatgcttaagttcaaaatgtttttgtttccatatctcccttggggcccctttgagaataaaaaaattag

SEQ ID NO: 434 - DNA, 1444 bp, Rattus norvegicus
cggccgtcgttcttctgcgtgcgcccggagctgcaagcacaagcagtctgcgttcctgctccgtcggaatcccgcctgccgccgccgccgccgccatgcccttctccaacagccacaacacgcagaagctgcgcttcccggccgaggatgaattccctgatctgagcagccacaacaaccatatggccaaggtgctgacccccgagctgtacgcggagctccgtgccaagtgcacgccgagcggctttacgttggacgacgccatccagactggcgtagacaatccgggccacccgtacatcatgacagtgggtgcagtggcgggcgacgaggagagttacgacgtattcaaggaccttttcgaccccatcatcgaggaccggcacggcggctaccagcccagtgatgagcacaagactgacctcaacccagacaacctgcagggcggcgatgacctggaccccaactacgtgctgagctcgcgggtgcgcacaggccgaagcatccgcggcttctgcctcccccctcactgcagccgtggggagcgccgcgccatcgagaagctggcagtagaagccctgtccagcctagatggcgacctgtctggcaggtactatgcgctcaagagcatgaccgaggcggacgagcagcagctcattgacgaccacttcctcttcgacaagcctgtgtcgcctctgctgctggcctccggcatggcccgcgactggccggatgctcgcggcatttggcacaatgacaataagacgttcctggtgtggatcaacgaggaggaccacctccgggttatctccatgcagaaagggggcaacatgaaggaagttttcacgcgattctgcactggcctcactcagattgaaactctcttcaagtctaagaactatgagttcatgtggaaccctcacctgggctacatcctcacatgcccatccaacctgggcactgggcttcgggcaggcgtgcacatcaagctgccccacctgggaaagcacgagaagttctcggaggtgctcaagcgactgcggcttcagaagcgaggcacaggtggtgtggacaccgctgctgtgggtggagtttttgatgtctccaacgctgaccgcctgggcttctcggaggtggagctggtgcagatggtggtggacggagtgaagctactcattgagatggagcagcggcttgagcagggtcagcccattgacgacctcatgcctgcccagaagtgaagccgtggccctagccaccaccaggctgccgcttcctaacttattacccgggcagtgcccgccatgcatccttgatgtttgccgcctgccgggtgagccccttagcctcgctgtagagacttctgtcgccctgggtagagcctttattttttctgatggctaagctgttgcagacactgaaataaattagggtttggcctgcc

SEQ ID NO: 435 - DNA, 3237 bp, Rattus norvegicus
gcacagctgcttcttcagtggaggaaaagaaaatggtcagaatgagaacacttggagctatggcagtaatgctggttgtgatgggaactgcaattttcctccctttcctcctgagaagcagagacatcttgggggggaagactatgacatcccatgttatcagtgttgtagaaacgagccagcttctggtggacaatgcagtctacaacaccatgaaaagaaacctcaagaaaaggggagtcctttctccagcccagcttctctctttctccaagctgccagagtccaccagtggagctatttcccgagcagcagagatcatggaaacatcaatacaagtcatgaaacgtgaacaatcacagttctccacggatgcactatcagcagacatcctggccacaattgccaacctgtcaggatgcttgcctttcatgctgccaccgagatgtcctgacacctgcctggcaaacaagtaccggcccatcacaggggtgtgcaacaacagagatcaccccagatggggagcctccaacacagccctagcaagatggctgcctcctgtctacgaagatggtttcagtcagcccagaggctggaaccctaatttcttataccatggcttcccactgcccccggtacgggaggtgacaagacacctcattcaagtttcaaatgaggctgtgactgaagatgaccagtactctgattttctgccggtgtggggacagtacatcgatcatgacattgctctcacaccacagagcaccagcacagcagccttctggggaggtgtcgactgccagttgacctgtgagaaccaaaacccctgcttccccatacagcttccctcaaactcctcacggaccactgcatgcctacctttctaccgctcctcagccgcctgtggcactggggaccaaggagcactctttggcaacctgtctgcagccaatccgaggcagcagatgaatggcttgacctccttccttgatgcttccacggtgtatggcagctccccaggtgttgagaagcagttgcgcaactggagcagctctgcagggctgctgcgtgtcaacaccctccacctagactctggccgtgcctacctgcccttcgcatcagccgcctgtgctccagagcctggtgctccacacgccaaccgcacgccctgcttcctggctggtgatggccgcgccagcgaggtccccgccctggcagcagtgcacaccttgtggctgcgcgagcacaaccgcctggctacagctttcaaagccatcaacacacattggagcgccaacactgcctaccaggaggcacgcaaggtggtaggggcattgcaccagatcatcaccatgagggattatatccccaagatcctgggtcccgatgccttcaggcagtatgtgggcccctatgaaggctataaccccacggtgaaccctactgtgtccaacgtcttctctactgctgccttccgctttggccatgccacagtccatccactggtgagacgactaaacacggacttccaggaccacacagagctccccaggctgcagctgcacgacgtcttcttcaggccctggaggcttatccaggaaggtggtttggatccaatagtaagaggcctcctggcaagaccagccaagctgcaagtacaggagcaactgatgaatgaggaactgaccgagaggctctttgtgttgtctaatgtgggcaccttggatctggcatcactgaacttgcagaggggccgggaccacggcttaccaggctacaatgagtggagagagttctgtggcttgtcacgcctggacacaggagctgagctgaacaaggccattgccaacagaagcatggtcaacaagataatggagttatacaagcatgctgacaacattgatgtctggttgggaggcctggctgaaaagttcttaccgggagcccgcaccggtcctctgtttgcatgtatcattgggaagcagatgaaggctctgagggatggggacaggttttggtgggagaacagccatgtcttcacagacgctcagaggcaggaactggaaaagcattcactacctcgggtcatctgtgacaacaccggcctcaccagagtacctgtggatgccttccgtattggaaagttcccccaggactttgaatcctgtgaggaaatccctagcatggacctcagactgtggagggagaccttcccacaagacgacaagtgtgtcttcccagagaaggtggacaatgggaactttgtgcactgtgaagaatctgggaagctggtactggtgtattcctgtttccatggatacaagctgcaaggccaggagcaggtcacatgtacccagaatggatgggactcagagcctcctgtctgtaaagatgttaatgagtgtgcagatctgacacacccaccttgccactcctccgcaaagtgcaagaacaccaagggaagcttccagtgtgtgtgcacagacccctacatgctaggtgaggatgagaagacctgcatagattctggcaggctacctcgggcatcctgggtctccattgcattgggtgcacttctcattggtggtttggccagtctcagctggactgtaatttgcaggtggacacatgctgataagaagtccacattgctgatcaccgagagagtgaccatggagtcaggattcagaaagagtcaggagagtgggatttcaccacaaaaggccgaggttcaagatgctgaacaggaaccggcttatggatccagagtcctcctgtgtgaatagaagtcctcactgctttggagccagacattggctaattcaagtctcaagctgcctgggcaaagaaagacatgatacatgttgaagtcagaggcttgaggacaccagatggttaatcttatcagtccaaggctgcatagctgagttccatctcatgtttttccacaggagcaggccaggccagactgtgctaatgcctctcctacacagtaaggctaatggataagtaggtggaaggataggagaattgcataagcctgaaagcgttgagagaagctagcatagactccagatccttccagacaattccacgttcattcagaatcagaatgtatctcttccagatacattcagttctctcattatgttccagtcaccacaaagcacagacgaataaatgccacagcccttctctggtctagctcagatatcctcttcctctaggcttgcatta

SEQ ID NO: 436 - DNA, 3876 bp, Rattus norvegicus
ctcagattggagtgaacaaccatcgccaccatgggggagcttttccgaagcgaggagatgaccctggcccagctctttctccagtccgaagctgcttattgttgtgtcagtgaattagaagaacttggaaaggttcagttccgggatttaaatccagatgtgaatgttttccagaggaaatttgtgaatgaagttagaagatgtgaagaaatggatcgaaaactccggtttgttgagaaagagataagaaaagctaacatcccaattatggacactggagagaacccggaggtgccctttcccagggacatgatcgacttggaggccaatttcgagaagatcgaaaacgaactgaaggaaatcaacactaaccaggaagctctaaagcgaaacttcctggaactgactgaattaaaatttatactgcgcaaaactcagcagtttttcgatgagatggcggatccagacctgttggaagagtcctcatcactcttggagccaaacgagatgggaagaggcgcgcctttacgacttggcttcgtagctggtgtgattaaccgggaacggatcccgacctttgagcgcatgctttggcgagtgtgccgagggaatgtgttcctgagacaggctgaaatcgaaaacccgctggaggatcccgtgactggcgactacgtgcacaagtccgtgttcatcatttttttccaaggtgaccagctgaaaaacagggtcaagaaaatctgtgaagggttccgagcctccctctatccctgtcctgagactccacaggagagaaaagaaatggcttccggagtcaataccaggatcgacgatctccaaatggttctgaatcagacagaggaccaccgccagagggttctgcaggcggctgctaagaacatccgggtgtggttcatcaaggtgcggaagatgaaagctatctaccataccctgaacctctgcaacatcgatgtgacgcagaagtgcctgatcgcggaagtctggtgccccgtcactgacctggactccatccagtttgcactgcgaaggggcacggagcacagcggttccactgtcccctccattctgaacaggatgcagacaaaccagacaccccctacgtataacaaaaccaacaagttcacgcacggcttccagaacatagtggatgcttatgggatcggcacttaccgagaaattaacccagctccgtacaccgtcatcaccttcccctttctgtttgctgtgatgtttggagattttgggcacggcattttgatgactctgtttgctgtgtggatggtgttgagggagagccggatcctctcccagaagaacgagaatgagatgtttagcatggtgttcagcggccgatacattatccttctgatgggactgttctccatctacactggactcatctacaatgactgcttttccaagtctctgaatatctttgggtcatcatggagcgtacggccaatgttcaccatagggaactggacggaggagacgctcctggggagttctgtcctccagctgaacccagctatccctggagtctttggtggcccttacccatttggcattgatccgatttggaacatcgcaaccaacaagctgaccttcctcaactccttcaagatgaagatgtcagttattcttgggatcatccacatgctgttcggggtcagcctgagccttttcaaccacatctatttcaagaagcccctgaacatctactttggctttattcccgagataatcttcatgtcctcgctgtttggctacctggtcatcctcatcttttacaagtggacagcctacgatgcccactcgtctagaaatgccccgagcctcctgatccatttcataaacatgttcctcttctcctacccagagtctggtaacgcaatgctgtactctggacagaaaggaattcagtgtttcctcatagtggtggcaatgctctgtgtcccctggatgctgctgtttaagccgttgatccttcgccatcagtacctgaggaagaagcatttgggaactctcaactttggtgggatcagggtgggcaacggaccgacagaggaggatgctgaaattattcagcatgaccagctctccacccattcagaggacgcagaagagcctaccgaggacgaagtgtttgactttggcgacaccatggtccaccaggccatccacaccattgagtactgcttgggctgcatctccaacactgcgtcctacctgcggctctgggccctcagcctggcccatgcacagctctctgaagtactctggaccatggtgatccacatcggcctgcatgtccggagtctggcagggggactggggctgtttttcatcttcgctgcctttgccaccctgaccgtggccatcctgctgatcatggaaggcctctcagccttcctccacgcactgcgattacactgggtggaattccagaacaaattctacactgggactggtttcaagttcctccccttctcctttgagcacattcgggaagggaagtttgatgagtgagtctcaggcagggcgcatgctcagagcagctctcctgcctgcctctacagtgactgtgtctcttgcctgctggttgtgatccctggatactcgggcgtttgtgtcaccctacaacccctgtccccgctgtgactcatttaggttgtgctggccttccctgggtctctttctcccaagccttgggtgttacgtacagactttcgactgagagctggatggctgtgcctgatacccacccatccccatggcaccacttggcctcctggcctccagacagatagccctattccatcccctaatggtgagccaacctgcacagacacataggggcacggagccctcaggatgcaaggggtccctcatcagtccaggagttcttggtcacgccttggaggaagatggcaatgggttctctcctagaaggggatattgcttatggaacatacccgactccgctggcagggacagtcaggaagatgctgctgtcaccctttgtccagcctctccagtgagtattcaggaaactcagttggccctacctgggccatctcaaaggttccaggataacccccaccctcctagcccccaccctcctaaacactctcctcccccagccctgttggcacagcatagctagcatccgtagaatgggagggtcgcactgacttgcagcaccgggcttccggaccttagattcccttctctgtcagtgcgtgaatgggccttgccaacactacaccccaaggcagaagttaaaattggcacactcccggcatatccctgagcccttctgcaccctgatcatgatgtcctgaggctgtggtcagtaaggttggttctgccggcaggcctgccttgatctgcccacttattactccctctccaatccccatgctgaccccaggtttcaggagtggcgtcctggacagggaaggtcagtgtcatttacaatttgctaatcagaggcgactgttgggctaccagagcagatgtgggagcgctgctaagcccttgccgcctacctcatgtactgtggatctcagacccttctaatcatgtgctgactcccgaaattcactcactgccttccctgtggaggtaatactaaatcagcaaggcccctcccctcccccaccctggcgctcttgagccgctcccacggtgaattgttcagagcccctctgtccttttgtgcccagtttacatgatgatctctgctgtttacagagaggcccacagcagaggtctctgtggggaccctgcccaaggccttctgttcagacattcttatccggaataaagtgtgtttgactctgacaaaaaaaaaaa

SEQ ID NO: 437 - DNA, 3109 bp, Rattus norvegicus
cccgtctgggagctcgcggttcctgtgctgactctcaaagggctgactgaccctcgcacctagcaggtacttctggattgcaagtccagggttctgggccggtgaccctgttttctctacttcctgtctttgaccttgggtaccttccaacccactgttgccatgaagattgcagtaatcggacagagcctgtttggccaggaggtttactgccagctgaggaaggagggccacgaggtggtgggtgtgttcacaatcccagacaaggatgggaaagcagaccccctgggcctggaggctgagaaggatggccgtgccgtgttcaagtttcctcggtggcgtgctcggggacaggctctgcccgaggtggtggccaaataccaggctctgggtgcagagctcaatgtgcttcccttctgcagccagttcatacccatggaggtcattaatgcccccaggcacggctccatcatctaccatccatccctgctacccaggcatcgaggggcttcggccatcaactggaccctcattcatggagataagaaaggaggcttcaccatcttctgggctgatgatggcctggacactggtgaccttctgctgcagaaggagtgtgaggtgcttccagatgacaccgtgagcacgctgtacaatcgtttcctcttcccagagggcatcaaagggatggttcaggctgtgcgactgatcgcagagggtacagccccccgctgcccccagtctgaggaaggagccacctatgagggcattcagaagaaggagacagccaagatcaattgggaccagccagcagaggccattcacaactggatccgtgggaatgacaaggtgccaggtgcctggacagaggcttgtgggcagaagctgacatttttcaactcgacactcaacacttcaggactgtcaacccagggagaagctttacccatcccaggagcccatcgtccaggcgtggtcaccaaagcaggactcatcctctttgggaatgagcatagaatgttgctggtgaagaacatccagctggaagatggcaagatgatgccagcctcccagttcttcaaggggtccgctagcagtgacctggagctgacagaggcggagttggccacggcggaggctgtgcggagctcttggatgcgaatcctgccgaacgtcccagaggtggaagactctacagatttcttcaagtcaggagctgcttctgtagatgttgtgaggctggtggaggaagtgaaggagctgtgtgacgggctggagttagaaaatgaagacgtttacatggccaccacctttagggagtttatccagctcctagtgaggaagctgagaggggaggacgacgagagcgagtgtgtcattaactacgtggaaagggcagtgaacaagctgactctccaaatgccctaccagctcttcataggcggcgagttcgtggacgctgagggctctaagacctacaataccatcaacccaacggatggaagtgtcatctgccaggtgtccctggctcaggtgagcgatgttgacaaggcagtggcagcagcaaaggaagccttcgagaacggactgtggggaaagataaatgctcgtgaccggggccggctcctgtacaggttggcggatgtcatggagcagcaccaggaagagctagccaccattgaggccctggatcgaggtgccgtctacacgctggccctgaagacgcacgtgggcatgtccatccagaccttccggtactttgctggctggtgtgataagatccagggtgccaccatccccatcaaccaggctagacccaaccgcaacctgaccttgaccaagaaggaacctgttggggtctgtggcattgtcatcccctggaactatcccttaatgatgctatcctggaagactgcagcctgcctggcggctgggaacaccgtggtgatcaagcctgcccaggtgaccccactcacagccttgaagtttgccgagctgacactgaaggctggcattcccaagggtgtggtcaacatcctcccaggatctggatccctggttggccagagactctcagaccaccctgatgtgaggaaaatagggttcacaggctccacggaggtggggaaacacatcatgaaaagctgtgctctgagcaacgtgaagaaagtctccctggagctgggtggaaagtcaccccttatcatatttgctgactgcgacctcaacaaggccgtgcagatgggcatgagctccgttttcttcaacaaaggggagaactgcattgcggcaggccggctctttgtggaggagtccatccacaaccagtttgtgcagaaagtggtggaggaggtggagaagatgaaaatcggcaatcccctggagagggacaccaatcatggcccgcagaaccatgaggcccacctgaggaagctagtggagtattgccaacgtggtgtgaaggaaggggccacactggtctgtggtgggaaccaagtcccaaggccaggattcttctttcagccaaccgtcttcacagacgtagaggaccacatgtacatcgctaaggaggagtcctttgggcccatcatgatcatctctcggtttgctgatggggatgtggatgctgtgctgtcccgggccaatgccacagaatttggcctggcctctggggtcttcacccgcgatatcaacaaggccctgtatgtcagtgacaaactgcaggcaggcactgtgttcatcaacacgtataacaagactgatgtggccgcaccttttggaggattcaagcaatctggatttggcaaagacctgggagaggcagccctgaatgagtacctgcggatcaagactgtgacttttgagtactgaagccaagtctgtgatatttctcctgtaccctgttgcctcccctcagggagccctggcccctgtctggtgtcttagcaccctcctgtccccaacactgttcccttcagctgctggagctatcagtgtggacccctgctggtgacaggacacctccggacaattggaagtggttccaagtggagtgagcagtcatgtcccggatgaataaaggttgtgagcagaagtcacctgcaaaaaa

SEQ ID NO: 438 - DNA, 1339 bp, Rattus norvegicus
gcactcttgcgggtcgttgtgcgtaacttgcagcaatcatggctagccatctggaactcaacaacggcaccaagatgcccaccctgggtctgggcacctggaagtctcctcctggccaggtgaccgaggctgtgaaggttgctatcgacatggggtatcgccacattgactgcgcccaggtgtaccagaatgagaaggaggtgggggtggccctccaggagaagctcaaggagcaggtggtgaagcgccaggatctcttcattgtcagcaagctgtggtgcacgttccacgaccagagcatggtgaaaggggcctgccagaagacgctgagcgacctgcagctggactacctggacctctaccttattcactggccaactggcttcaagcctgggcctgactatttccccctggatgcatcgggaaacgtgattcctagtgacaccgattttgtggacacttggacggctatggagcaactagtggatgaaggtttggtaaaagcaatcggagtctccaacttcaaccctcttcagattgagaggatcttgaacaaacctggcttaaagtataagcctgctgttaaccagatcgagtgccacccatacctaactcaggagaagctgattgagtactgccattgcaaaggcatcgtggtgactgcatacagtccccttggttctcctgacaggccctgggccaagcctgaggacccctctctcctggaggatcccaggatcaaggaaattgcagccaagtacaataaaactacagcccaggtgctgatccggttccccatccaaaggaacctggtcgtgatccccaagtctgtgacaccagcacgtattgctgagaactttaaggtctttgactttgagctgagcaatgaggacatggccactctactcagctacaacaggaactggagggtgtgcgccttgatgagctgtgccaaacacaaggattaccccttccacgcagaagtctgaagctgtggtggacgaatcctgctcctccccaagcgacttaacacatgttctttctgcctcatctgcccttgcaagtgtccctctgcactgggtggcaccttgcagaccagatggtgagagtttgttagtttgacgtagaatgtggagggcagtaccagtagctgaggagtttcttcggcctttcttggtcttcttcccacctggaggactttaacacgagtaccttttccaaccaaagagaaagcaagatttatagcccaagtcatgccactaacacttaaatttgagtgcttagaactccagtcctatgggggtcagactttttgcctcaaataaaaactgcttttgtg

SEQ ID NO: 439 - DNA, 2515 bp, Rattus norvegicus
cgatcgctgggcggagaaggcaccgcggtccgcagacccgctgcgggccgggcacagccgggcacccccggccccgcgcctgctcctcccagcgctcccgcgccagccgggccaggcgcgcctgacgtggaccattaaacttggagctgccgcctcgtcccctctctcctcctcctcctcctcctccttctgacaggcgagcgagccgctgggtgcaggcaggcgacgtgctgccgggctaggctgcccgggggagatgacttctcgccaggaggacgcctctggaaagaagaccacggagggagcaaagtttcagggtagctgaggtgccttggtcgcagcccttccgagcccaatctcctccctggctatggagggcggactttaaaatgaatcccgatctggacaccggccacaacacatcagcacctgcccactggggagagttgaaagatgacaacttcactggccccaaccagacctcgagcaactccacactgccccagctggacgtcaccagggccatctctgtgggcctggtgctgggcgccttcatcctctttgccatcgtgggcaacatcttggtcatcctgtcggtggcctgcaaccggcacctgcggacgcccaccaactactttatcgtcaacctggccattgctgacctgctgttgagtttcacagtactgcccttctccgctaccctagaagtgcttggctactgggtgctggggcgcatcttctgtgacatctgggcagcggtagatgtcctgtgctgtacggcctccatcctgagcctatgtgccatctccattgaccgctacattggggtgcgatactctctgcagtaccccacgctggtcacccgcaggaaggccatcttggcgctcctcagtgtgtgggtcttgtccacggtcatctccatcgggcctctccttggatggaaagaacctgcgcccaatgatgacaaagaatgtggggtcaccgaagaacccttctacgccctcttttcctccctgggctccttctacatcccgctcgcggtcatcctggtcatgtactgccgggtctacatcgtggccaagaggaccaccaagaatctggaggcgggagtcatgaaggaaatgtccaactccaaggagctgaccctgaggatccactccaagaactttcatgaggacaccctcagcagtaccaaggccaagggccacaaccccaggagttccatagctgtcaaactttttaagttctccagggaaaagaaagcagccaaaaccttgggcattgtagtcggaatgttcatcttatgttggctccccttcttcatcgctctcccgcttggctccctgttctccaccctaaagcccccggacgccgtgttcaaggtggtgttctggctgggctacttcaacagctgcctcaatcccatcatctacccgtgctccagcaaggagttcaagcgcgccttcatgcgtatccttgggtgccagtgccgcggtggccgccgccgccgccgccgtcgccgtctaggcggctgcgcttacacctaccggccgtggacccgcggcggctcgctggagagatcacagtcgcggaaggactctctggatgacagcggcagctgcatgagcggcagccagaggaccctgccctcggcgtcgcccagcccgggctacctgggtcgaggaacgcagccacccgtggagctgtgcgccttccccgagtggaaacccggggcgctgctcagcttgccagagcctcctggccgccgcggccgtctcgactctgggccactcttcaccttcaagctcctgggcgatcctgagagcccgggaaccgaaggcgacaccagcaacgggggctgcgacaccacgaccgacctggccaacgggcagcccggcttcaagagcaacatgcccctggcgcccgggcacttttagggtcccttttcatcctccccctcaacacactcacacatcggggtgggggagaacaccatcgtaggggcgggagggcgcgtggggggagtgtcagccctaggtagacacagggtcgcaaggggacaaggggggaggggggcggggagaggggcagctgcttttctggcaggggcatgggtgccaggtacagcgaagagctgggctgagcatgctgagagcgtggggggcccccccgacgccggccgggacttaagtctctctctcttctctctctgtatatacataaaatgagttcctctattcgtatttatctgtgggtacacgtgcgtgtgtctgttcggtgtacgtgtgggctgcatgggtgtgagtgtgaggcctgcccgcacgcgcgtgccggggcagagcgagtgcgccccctggtgacgtccaggtgtgttgtttgtctcttgactttgtacctctcaagcccctccctgttctctagtcaatgctggcactttgataggatcggaaaacaagtcagatattaaagatcatttctcctgtgaaaaaaaaaaaaaaaaaaaaaaaaaaaaaaa

SEQ ID NO: 440 - DNA, 2519 bp, Rattus norvegicus
agagcccgtgaggcggccggaccatcatcgtcctgctaatacagctacttcctcaaccaccggtatgagccacgggaagagaaccgacatgctcccggagatcgccgccgccgtaggtttcctcaccagtctcctgaggactcggggctgcgtgagcgagcagagactcaaggttttcagtagggcgctccaggacgcactgaccgatcattacaaacaccactggtttccagaaaagccatccaagggctccggctatcgctgtatccgcatcaaccacaagatggaccccatcatcagcaaggtggccagccagatcggactcagccagccccagctgcaccagctcctgcccagcgagctgaccctgtgggtcgatccctacgaagtgtcctaccgcatcggggaagatggatccatctgcgtgctgtatgaggaggcgccggtggccacctcctacgggctcctcacctgcaagaaccagatgatgctgggcaggagcagtccatcgaagaactacgtgatgactgtctccagctagagaggagccgccccgccctggcactctactgttctcatgctgccctgacaacaggccaccgtatacctcaacctggggaactgtatttttaaagtgaagagctatttatacatgttatttttttttttaagaaaagaggaggaaaaaaaccaaaagtttttttttaaaaaaacaaaaaagaaaaaacaattcgttaacgggagctgcttggaagtggtctccccaggtgcctttggagagaactgttcttgattgagtctatgagccagtgtttgcctaggggagtgggttggggattggcctagccaaggtaaaaggggattcttggctgatcccccaggaggtggtggaagggagcaaggttagcaactgtgaacgagaggggtcagggtctgctctgggttaccgttcccgctgggatgcctgtattcctggtccctctcttactcaggggcattcaagcctggtctcaaataatactacattgcctaatcttctcttttgtttttctgctgagatcctgggcacacggaaaggcctctcctgtcccttccgtctgagcagagtttcttgaaactgtgtctcgtttctgatcctaccctcggggtcctgaagaggtggtttcccggcctagaatctatctaaacgtttttggagggtgggctataaggcagatataatggaggggaaccgcacaaaccctttgctttgctctgtgctgctttgtatggatggatggttaataacttagggatgatttgcaatggaattttgggacccaaagagtatccaatgggggtgggtgttttggacctaagccctccttttgggaaccacgtgacagtctgaatgctgctaccattattcctttgagaggtggctcaaagctccagggaactccaggtcctttcttactgccttctcttcaagagcaacctcccccatttcttttccctctttcctgcggttgggtcctggagggccccatttcctaggacaagagttctcaatcactgtgcaatagtcccaggaagctctggaactgggcctcccagcccctcctgattcctggtgggttttaggaccccgccttccccgttcttctgactggctggtgggccttgaggagatctccctcggccgcagggagggcacctgtgcactgcaggactacctggtactcctgtggggctgccacggagagccaaaccttaggcatagctttgtctcctcggtgctcagagcacctgcagggggaggttgcccccctcagtaaaaatccaaatttatttgtagatgtgtgcaatatttactgttctgggttggagaaaatcgggaaacactgggaagaagtggccttccttcaggttcagtgacactgatgagggcttctcagaaggcctcgagtctctcaaaccaaaggacagagctagagccagccagtcacccttagtgaggatccccttccccatgtctctccactgccgtggcatcccatgtcctggatttctcaattcctcagtttctactcaaaggtgctacttaccaaacactctgcccgtcccgctctccccagcttcgcacagccgtcccaggtggcttcgtctctcctgctttaaagttaactttgggcccacagacccgagagctgtgggttgaagcaaagctgtgaatcgctccagatggtccctgtgttctgtccacacacaggtccccgcctttttagaagcagcctcctggtctcatgcttaaatctgttcctcactgcccgtgttcactttagaaatggcagaaccacagagctggactgttgagcaggcctgtctctctcattaaatagaaataagtaagtttgtaagctattccgacagaagagacaaaggttactgattgtacaatagcgcttttatatggaagactgtacagctttatggacaaatgtaaaacttttttgtttttaataaaaatgtagcagacc

SEQ ID NO: 441 - DNA, 2452 bp, Rattus norvegicus
cggaggcgcatcggcactgcctggttctgggggctggggtagggaagagtggggctcactcctacacccaccgatgaagtctgtgagcctcctgatccggtcttgctgagagtgtgggcctatgcccctcccatgtgggaggtgggatagaaagtccctttcctcagcctctctgagtgggtttggtatctcttcgaaagggtgaggtggctttgaccccgggttgcccgccagcgcgaccgaggaggtggctggacagctggagaatgaacggagaagccgactgtcccacagacctggaaatggccgcccccaaaggccaagaccgctggtcccaggaagatatgctaactttgctggaatgcatgaagaacaaccttccatccaatgacagctccaagttcaagaccacagagtcgcatatggactgggaaaaagtcgcatttaaggatttttcaggagatatgtgcaagctcaaatgggtggagatttctaacgaggtaaggaagttccgtactttgacagaattgatccttgatgctcaggaacatgttaaaaacccttacaaaggcaaaaaactcaagaaacacccggattttccaaagaaacctctcaccccctacttccgcttcttcatggagaagcgggccaagtacgcgaaactccaccctgagatgagcaacctggacctgactaagatcctgtctaagaaatacaaggagcttccagagaagaagaagatgaaatatattcaggacttccagagggagaaacaggagttcgagcgaaacctggcccgattcagggaggatcaccctgaccttatccagaatgccaagaagtcggacatccccgagaagcccaaaactccccagcaactgtggtacacccatgagaagaaggtgtatctcaaagtgcggccggatgagattatgcgtgattatatccagaagcaccctgagctaaacatcagcgaggaaggtatcaccaagtctaccctcactaaggccgaacgccagctcaaggacaaatttgatggacgacccaccaagccacctccgaacagctactccctgtactgtgcagagctcatggcaaacatgaaggatgtgcccagcacagagcgcatggtgctatgcagccagcagtggaagctgctctcccagaaggaaaaggatgcttatcacaagaagtgtgaccagaaaaagaaagattatgaagtggagctgctgcgtttccttgagagcttgccagaggaagagcagcagcgggtcctgggagaggagaagatgttgaacatcaataagaagcagaccaccagtccagcctccaagaagccttcacaggaaggtggcaaaggtggttcggagaagcccaagcggcctgtgtctgccatgttcatcttctcagaggagaagagaaggcagcttcaggaggaacgacctgagctctcagaaagtgagctgacccgcctgctggcccgcatgtggaacgacttgtccgagaagaagaaggctaaatataaggcccgggaggccgcgctgaaggcacagtccgagaggaagcctggcggagagcgtgaagataggggcaagttgccagagtcgcccaagagagctgaggagatctggcagcagagtgtcatcggagactatctggcccgctttaagaatgaccgggtgaaagccttgaaagccatggagatgacgtggaacaacatggagaagaaggagaagctcatgtggattaagaaggctgcagaagaccaaaaacgatatgagagagagttaagtgagatgcgggcccctccagctgctacgaactcttccaagaagatgaagttccagggagagcccaagaaaccgcctatgaacggttaccagaagttctcccaggagctgctgtccaatggggaactaaatcacctgccactcaaggagcgcatggtggagatcggcagccgttggcagcgcatctcccagagccagaaggagcactataagaagctggctgaggaacagcagaggcagtacaaggtgcacttggacctctgggtcaagagcctatctccccaggaccgcgcagcatacaaagaatacatctccaataaacgtaagaacatgactaagcttcgaggcccaaaccccaagtctagccggaccaccctgcagtccaagtcggagtcagaggaagacgacgatgaggaagatgatgatgatgatgacgaggaggaagaagaagatgatgagaacggcgactcgtccgaggacggtggggattcttctgagtcgagcagtgaagatgaaagcgaggacggggatgagaatgaggatgatgacgacgacgaggatgacgacgaggatgacgatgaggatgaagacaacgagtctgagggcagtagctccagctcctcatcttcaggggactcctcagactctgactccaactgagg

SEQ ID NO: 442 - DNA, 4038 bp, Rattus norvegicus
ctcattgcccagcagcccccagccagtgacaggttccattcaccctctttgccccttcccccgcgacccttttccagaggctactagatcctttggtttcatcctgcacatcatggacaaggtttggtggcacacagcttggggactactttgcctcttacagttgagcctggcacagcagcagatcgatttgaatataacctgccgttacgcaggtgtattccatgtggagaaaaatggccgctacagtatctccaggactgaagcagctgacctctgcgaggctttcaacaccaccttgcccaccatggctcagatggagttagccctgagaaaggggtttgaaacatgcaggtatgggttcatagaaggacacgtggtaatcccgaggatccaccccaacgctatctgtgcagccaacaacacaggagtgtatatcctcctcgcatccaacacctcccactatgacacatattgcttcaatgcctcagctcctcttgaagaagactgtacatcagtcacagacctacccaattccttcgatggaccagttaccataactattgtcaaccgtgatggcacccgctacagcaagaagggcgagtatagaacacaccaagaagacatcgatgcctcaaacattatagatgaggatgtcagcagtggatccaccattgagaagagcaccccagaaggctacattttgcacaccgaccttcccacttcacagcctactggagaccgggatgacgccttctttattgggagcaccctggccaccattgcctcaactgtgtactcaaaaagccatgcaacagctcagaaacaaaataactggatatggtcttggtttggtaattcacaatccacaactcagactcaggatagccccacaacaacagcaactacagccttgatgactacccctgaaacaccacccaagaggcaagaagcccagaactggttttcatggttttttcaaccatcagagtccaagagtcatcttcatacaacaacgaagatgcctggtacggagtcaaataccaacccaacaggctggaagccaaatgaggaaaatgaagatgaaacagacaaataccccaatttttctggatcaggcattgatgatgatgaagattttatctccagcaccattgcaactactccatgggtttctgcccacacaaaacagaaccaggaacggacccagtggaacccaatccattcaaacccagaagtactacttcagacaaccaccaggatgactgatatagacagaaacagcaccagtgctcatggagaaaactggacccaggaaccacagcctcctttcaataaccatgagtatcaggatgaagaggagaccccacatgctacaagcacaacctgggcagatcctaatagcacaacagaagaagcagctacccagaaggagaagtggtttgagaatgaatggcaggggaagaacccacccaccccaagtgaagactcccatgtgacagaagggacaactgcctcagcccacaacaaccatccaagtcaaagaatgacaacacagagtcaagaggatgtttcatggaccgatttcttcgacccaatctcacatccaatgggacaaggtcatcaaacagaaagcaaggatacaggctccagtcatagtacaacccttcagcctactgcggctccaaatacccatttggtggaagacttgaacaggacaggaccactttcagtgacaactccacagagtcattctcagaacttctctacattacctggagagctggaagaaggcgaagaccatccaacaacttctgttctgccatctagcactaagagtggtcgaagaagaggtggaagtcttcccagagatacaactacttcactggaaggctacacccctcaatatccagacacaatggaaaacgggactctcttcccagtgacccctgctaagactgaggtctttggagaaactgaagggactgttgctactgactccaactttaatgtggatggctccttaccaggtgatggagactcatccatggaccccaggggtggtttcgacactgtgactcatggatccgaattagctggacactcaagtgggaatcaagacagtggagtgaccacaacttctggtcctgcgaggagacctcagattccagagtggcttatcatcttggcatccctcctggcgctggctctgattcttgccgtctgcattgctgtcaacagtaggagaaggtgtgggcagaagaagaagctggtgatcaacagtggcaatggaacagtggaagacaggaaaccaagtgaactcaacggggaggccagcaagtctcaggaaatggtgcatttggtgaacaaggaaccaacagagactccggaccagtttatgacagctgatgagacccggaatctgcagagtgtggatatgaagattggggtgtagtgcctatgccactaacttgaaaagacacaacaattggagacatgtcattactgggagctgggacccttaacagatgcaatgtgctactgattattttttattgggattattttgggcataaaatttccctttttttgttttttaaaagtttgttttccaatttatgaaaatagcattgctttctgaaatgagggtctcttccagttcctccttagaggccttgcattaccagggtatgctaccataggcttctaccaaatgaatactcttggtcccgattgaacccaaagtcccaggtaacatccaccagctaaggatttccccagaacttagagagattggtctctgggaggaaatttgaatgggtccatattgcctcccagcagtccaatctgtaggcattgctttgcagtggatgggagatcaggtgtactggttacacactctctttatagactcccttctgctggaaaatttccacatgcttctgagagattccccaaaggtgacgctatttatctttagtaagctatttatctttgtttttgaaatatcaaaccctggaggtccttttttcagtatgactttttttattttgtttttttttattttgttttttaggttactttgtcagaagcataacagggtataagttgattcataataaatacctgtccatcttccatcttgacctgttgtgctgtgatccttcagtttctaaatcagcaaggtctgagtctttgtagcacatcaatgtgaccttagtatggtcctctgaaactcatgttagagcatccgtgccctgcttgggtttacccagctgaatctcagaagatcaaggacaggagcactgttttcattctaggactatcaaaggggtttctctcctgttcaagaatctgaattgggagtaggagagcttctgtcccttttatgtttcgataaccacccatttctctttcttaaagggcacattaagtttttatatcttacaacattcgcggtcctgtttcatagacactgatcttattggcactttcacaaaacagtgtggaggggacttctgacaccttatagtaaaaggagaagccaacagaaatgaaagtgtggacagagagcagtagattggcatgaggaggcatgatgtacaacccccagaccactctttccatcaccacatttgttgatgctttcgcaagccagttggtacttagaatcagttccccagggaatccttcaaaaagccataagaatgcccacccctggaatcttaccaccaccagatgagcaggtttatggtttagcaaaaggagaatgctgtcaccctctgacctcatagttttcacatactgggcaagtgttcatctgccaggatgccccattgctcctaggtcttcccaggtaccttgtagaagaacttaaatctataaaataaggctttctctaaaatggaacttcctttctaaggctcccatttttactgttgactaaatttatatgtttaatagttttttttcaaataaaaacaaacacaaaaaggaaaaaaaaaaaaaaaaaaaaaaaaaaaaaaaaaaaaaaaaaaa

SEQ ID NO: 443 - DNA, 1737 bp, Rattus norvegicus
  misc_feature (1)..(1728): n = a or c or g or t
ggggcagctgcggagcatgtcgaccccggcccgtaggaggctcatgcgggatttcaagcgattgcaagaggacccacctgtgggggtcagtggtgcaccatctgaaaacaacatcatgcagtggaacgcagttatatttggaccagaagggacaccctttgaagatggtacttttaaactagtaatagaattttctgaagaatatccaaataaaccaccaaccgttaggtttttatccaaaatgtttcatccaaatgtgtatgctgacggcagcatatgcttagacatcctgcagaaccgatggagccccacgtacgacgtctcctccatcttaacttcaattcagtctctgttggatgagccgaatccaaacagtccggccaatagccaagcagcacagctttatcaggaaaacaaacgggagtatgagaagagggtttcggccattgttgagcagagctggaatgactcataatagacacctggtctgtccacctttccatcgtcgttgtgtataatttacctcccagtaggaaggctagcaagttttaagtgccacgggttttaaggattctgcagagaaaaaagaaaaagtccttcagtttagaacctacaaaagcttgtgtatcttgattaatgtactttttattgcatggtgtgaactaagttattgctgcataaatttgtaatatatcctgtttgtatttttttccaagtgtataatgttggtgtggagttttcatgacagaatatacacattttgtaaatctgtacttttttcaaatattgaatgccttatttttgaattctttagatttttaaattggagaaaagcacttaaagttttttatatatgaatattacatgtaaagctgttaaaatacataacttcagtgcaaaaaaacaggcatctggactcaatggtacctgattaagcccattcctctcagacacttggatgggagacccacacctggactcttttgagcttcagttgatggaattagtgcagcttgagtcagctcaacggggtctctgtgacttgtcctccttcttctgagaccttgcctgtgaaagtattcaaaacacctgcagtattgcctttagcgagttctcatagcaaaggacatagggtgggtgggactggattcgcaggtgaaattaaacctgacagggccgtgtgtttgcattttaatttgatatactcctgaacagtccatctctgacatgctctgccacaacccttctgtgtgtttccttagttactgctaccaaatatccgtgcagccctgcattactgtttccctgggtaccgctcatccccagcccctgaaagccccctggaggtggggaagctgtccccgttgcattcatcttacacacttgcaggctagcgcatgccacacgctctattagtactggtggcttgagtaaataagcaagttcacagctatcgccctctgcagtgcttcaaacactaatgtcttctaacaaatacaactttagtgatcactttgatgccattgaacatgaaacaggtttcttgttgatactagaagatatgtcagaggactcattcaagcctcttctcctgtttttttcgtgacacacatcgataagaagctgattttttttagactaaaatgcataacttaaaatatcttgngaattttttttaaaaggaagggatagaaaaaatatgtcatgaagaaggagaaaaaaaaaaaaaaaaaaaaa

SEQ ID NO: 444 - DNA, 1012 bp, Rattus norvegicus
gcctctcccaagtacaatggacacagcacgtgtctacctcagtttaaagccatccaagactgccgcgggggctcagtgtgtatcacctccatctcttcccccagatgcctgtcggtgcccacgttcacacaggttggctttgaagctcagctgcgctgggctgatccttcttgtcttggccctggttgggatgagtattttagtgcgagtcttagttcaaaaaccatcagtggagccatgccgagtgcttattcaagagaacctgagtaaaacaggtagtccagctaagttaaagtgcccaaaagactggctttcacaccgagataaatgctttcatgtttctcaaacttccatcacttggaaggaaagtctagctgactgtggtggaaaaggagccacgttgctgctcgttcaagaccaagaagaactgagattcctacggaacttgacaaagagaataagcagctcattctggattggattaagttacacattgtcagacgagaactggaagtggataaacggctcgactttaaattctgatgtattaagcatcactggtgacactgaaaaggacagctgtgcctccgtctcacaggacaaagtgctttctgagagctgtgattcagacaatatatgggtctgccaaaaggaactaaaatgtgaatgcatgtgtaatgactcctgactgcgaatcacacctggattactttaccatccacaccagatctgcctgacctgtctgtctctgctgcctgcctcccagtgcagcactggcacaaagcatggactctgaaagcactgagtcttatagagtcttcgttgtgtagatgtaaacgtacgcagacacagatgtgccatcctgtgagggagttctgtggaaagaagaccaggcagctgagggtcactggattctaatcctggagtctgtgtgaccttcgttggtctctgtgtctgaggtcatctgcaaaatagccatttgcaaaaatcattaaaatgctcctctgcaggg

SEQ ID NO: 445 - DNA, 2681 bp, Rattus norvegicus
tttattggatatgaattttacaaatattacgtcaattagcggtaacggtggagctgaagagtgttgcgccttctccaggctgcacggcgagacccaccaatggtgtggtggaacttgtggccctttccaaggccacggctcttgcggccagcagatgtcagcccacgcatctccctgtgcttgtggactggtttggtaatccattgggtgtcgggatttcttctgatagctttatggaatggatcaatgaggataacctcaaaaaatttatatgtggaatcttcaccaacccagtaggaattcaggactctcaaagctccacaatggcgcccagctctctcctcagcaacagactgaaggcttcggctagttttgtgcgtctacaaagctttgagcggaattttagcttcggcaaacaagtccccccagctcctccagctaattcccgcgacttctctccagacaccagctccagacagtgactgatgcctctctggttgtgattccagcgcagaaactcgaaggagccctttgcccgccgtcctatttagtcaactctttcctagccgcgaatgaccatgtgtagcggagcaaggttggccctgttggtctacgggataataatgcataacagcgtctcctgttcacctgccgccggactcagcttccctgggatcagaccagaagaagaggcttacgatcaggacggaaacccgctgcaagacttctacgactgggaccctccgggcgcagggagccccgcctccgcgctgcgtgacgcctacgccctttactacccagccgacaggagagatgtcgcccacgaaatccttaacgaagcctaccgcaaagtcttggaccagctgtccgccaggaagtacctgcagtccatggtggccaggggcatgggcgagaacctcgccgccgccgcggtggacgaccgggcaccccttaccaaacgccactcggacggcatcttcacagacagctatagccgctaccgaaaacaaatggctgtcaagaaatacttggcggccgtgctagggaaaaggtataaacagagggttaaaaacaaaggacgccgaatagcgtacttgtagcgatgagttgccagctaccgtgtgtataaaatgaaaagtcgttttccaaattgactgaccagtcatcactcatgtgttctttccaaacatgtatttatgtatcaagtaaagccattaaatgactattttgataataatattgtttttctttttacgaagcactggagaatgcacagatatactttgtggaccaattattgatatatattataagtatatattaagaatatatataggtatagcagagagcaattcataagcgtgcacaaagattgaaaattcgcctgagctgtttatgtttttatataaaatgaatagagaaaatagacaaccattgttttgaatattactcctatttttgtaaactggaattaaaggatagtatttttatccacaaccggcttgaagataccaataatggccatttgtacaaaaaaatgatgccctgctccaggagaattctgaggtaatgacttcccaaattgctgaagggctttctttccttgtgagtctctggggcaggctgcttgaaccccagcctaactaactcaagtgggcattgtcccactggttgcgggacaattccaacactttcattttctttgactatacctttatgtgtatctgtctctcctcagagtcccagcccataaggaaattctaattactgaacagctcgatccaaattgtgcttctccccaaaattcatgtcatttccttggagaagagtcgaggaactgtacagaagagaccagcttggagagaaagcgctcttttttgtacttcctgattcttcagggaactgactatcctaaagctagggcaattggaacaaagtgaaagataaagagaggactggaaggggcagagcatggggtgtggaggaggaccctgtagagggactgatttgagagttgcctcaggtctgagaatctgggggcaagtctagtccctctgcaggttccactgcctgacagatcaggtgctggtgttggaatgaatgaatgcaaagtacaatgtgtttttctccagtgctgtccatgcttttcatgtcgtgaaatgaccaggatcctcccctttgaacactgctctgcagaagccacccctattctttgtggtttttctggagaacctccttcctacccttgccctcctgcactgtttaagaatctcgtatgccattttccactcacttatcttaaatttgtgaatgctagttattttttgttgttgtttgatgcaagcagttactgtgaagtttaggaacccctgtttagctaccacagagtgagtatgcactaaatatgaaccttttgtttcttgtttattgagtttgtaggtaaaatgtatttttctatattatggcttattgcttagtaaagcaagcccagcttcctgaggggccttttgtcctgttagcaattgaggcatttgcagaacactgtacagaccccgctctcccctgtacattcctccctggtggtgcccggtccccacttggggatgggagttttgtagactgtacagaaatcggcaccctattttcttgcagctctcagattttgttaatctggattatac

SEQ ID NO: 446 - DNA, 2130 bp, Rattus norvegicus
ttttctccgagttttctgaactctggctcatgatcgggcttactggatacgagaatcctggaggaccgtaccctgatttccatctacctctgactttgagcctttctaacccggggctcacgctgccaacacccgggccacctggtccgatcgtcttacttcattcaccagcgttgccaattgctgccctgtccccagccccaatgggggagtgagagaggccactgccggccggacatgggtctccccatcgtgcctggcctgctgctgtcactggtgctcctggctctgctgatggggatacacccatcaggggtcaccggactggttccttctcttggtgaccgggagaagagggataatttgtgtccccagggaaagtatgcccatccaaagaataattccatctgctgcaccaagtgccacaaaggaacctacttggtgagtgactgtccaagcccagggcaggaaacagtctgcgaggtgtgtgataaaggcacctttacagcttcgcagaaccacgtcagacagtgtctcagttgcaagacatgtcggaaagaaatgttccaggtggagatttctccttgcaaagctgacatggacaccgtgtgtggctgcaagaagaaccaattccagcgctacctgagtgagacgcatttccagtgtgtggactgcagcccctgcttcaatggcaccgtgacaatcccctgtaaggagaaacagaacaccgtgtgtaactgccacgcaggattctttctaagcggaaatgagtgcaccccttgcagccactgcaagaaaaatcaggaatgtatgaagctgtgcctacctccagttgcaaatgtcacaaacccccaggactcaggtactgccgtgctgttgcctctggttatcttcctaggtctttgccttttattctttatctgcatcagtctactgtgccgatatccccagtggaggcccagggtctactccatcatttgtagggattcagctcctgtcaaagaggtggagggtgaaggaattgttactaagcccctaactccagcctctatcccagccttcagccccaaccccggcttcaaccccactctgggcttcagcaccaccccacgcttcagtcatcctgtctccagtacccccatcagccccgtcttcggtcctagtaactggcacaacttcgtgccacctgtaagagaggtggtcccaacccagggtgctgaccctctcctctacggatccctcaaccctgtgccaatccccgcccctgttcggaaatgggaagacgtcgtcgcggcccagccacaacggcttgacactgcagaccctgcgatgctgtatgctgtggtggatggcgtgcctccgacacgctggaaggagttcatgcggctcctggggctgagcgagcacgagatcgagcggctggagctgcagaacgggcgttgcctccgcgaggctcattacagcatgctggaagcctggcggcgccgcacaccgcgacacgaggccacgctggacgtagtgggccgcgtgctttgcgacatgaacctgcgtggctgcctggagaacatccgcgagactctagaaagccctgcccactcgtccacgacccacctcccgcgataaggccacacccccacctcaggaacgggactcgaaggaccatcctgctagatgccctgcttccctgtgaacctcctctttggtcctctagggggcaggctcgatctggcaggctcgatctggcagccacttccttggtgctaccgacttggtgtacatagcttttcccagctgccgaggacagcctgtgccagccacttgtgcatggcagggaagtgtgccatctgctcccagacagctgagggtgccaaaagccaggagaggtgattgtggagaaaaagcacaatctatctgatacccacttgggatgcaaggacccaaacaaagcttctcagggcctcctcagttgatttctgggcccttttcacagtagataaaacagtctttgtattgattatatcacactaatggatgaacggttgaactccctaaggtaggggcaagcacagaacagtggggtctccagctggagcccccgactcttgtaaatacactaaaaatctaaaagtg

SEQ ID NO: 447 - DNA, 2681 bp, Rattus norvegicus
ggcacgagctttgggaccccctactggttggtaggcaggatggtgagctccttgcctctgggtagcggacacctgtgggccgcgtggatgcacaggggatccttgtggagtaagtgtactgggagccacctcacacctgatacaaaagccagtggtggagtgagtgctgctattttaagttgctgaatggaacctctaaggacaaggggaggggacagaggttaagcacatagtgagcctgaatgctgccagggctggccaggcactgcatccgtttactggggcacatcttcgcagggctgcctatgttcccctccttcccaggctggcatccccaccgcaggcttcctgaccacaggtgctggcctcgtgccccagggcgcctgtctgctgatgtgcccagctcctgcccaccatgccgccctacatctcggccttccaggctgcctacattggcatcgaggtgctcattgccttggtctctgtgcccggaaatgtactggtgatttgggctgtgaaggtgaaccaggcacttcgcgatgccaccttctgcttcatcgtgtcactggcggtagctgatgtggccgttggcgccctggtcatcccactggccatccttatcaacattgggccacagacctacttccacacctgcctcatggtggcctgccctgtcctcatcctcacccagagctccattctggctctgctcgccattgctgtggatcgatacctccgagtcaagatccctctccggtacaagacagtggtgacccagcggcgggcggcagtggccatagctggctgctggattctctcccttgtggtaggcctgacacccatgtttggctggaacaacctgagtgtggtagagcaagactggagagccaacggcagtgttggggagcccgtgatcaagtgtgagtttgagaaggttatcagcatggagtacatggtctacttcaacttcttcgtctgggtgctgccgccactgctcctcatggtcctcatctacctggaggtcttctacctgatccgtaagcagctcaacaaaaaggtgtcagcctcctccggtgacccccagaagtactacgggaaggagctgaagatcgccaagtcgctggccctcatcctcttcctctttgccctcagctggctgccgctgcatatcttgaactgtatcaccctcttctgccccacctgccagaaaaccagcattctgatctacatcgccatcttcctcacacacggcaactccgccatgaaccccatcgtctatgccttccggatccacaagttccgggtcacctttctgaagatttggaatgaccacttccgatgccagcctaagcctcccatcgatgaagacctcccagaggagaaagctgaggactagactctgccttgctccgtctagcccatgcccagcggctctctgttcaactcccacgtcctccctgtcccaccctgtcccactgtccctcctcagttttcccagctggggtgtaggctgtggacaccagggaggctctgaagagataccatggaatagggcccccctataaggagctagctgccctgtacttggggacccggaggaggcttggaggtggggcgggctatgatagggaactgggtgccctgagatgtgaggagagtcttgtgtgccccatccctggctgttctctgagctgttcagagagccagggttagaatattctggctcctacagtcaggcagggaggggagcctgctattatgtgttggtggcccgagggaccaacttcaagtgagaaagacagtcccttagaggtaaatggatagagagaggatatgtcctggctttgctgtctctcctcttctgtaggagaagacagtaaatcacagggaaggagactcagcccctcctccaaggattgtgtgcttggccatgcaggcgctgtggtacctgctttcctcacctgggcttatacttgggagaggcagaaagaatgggtccagggatcctctcacatttactttattcacatcctggcactcaaagtgggccacaaagtccttgggaataaaaatagtgcagaaggtgctggcttcagctagccagcagggagcagcactgagcccttcttgccctgaacttcctgggagtccccagtgtaatttactgtctggggcaccaagcttcaccaactctcagagcaggcctggactctccttccaaggcccaggagaagggatccctgggaaggacaacccttgggagcatgctgcctgagggggtaggaagggaaagcgtccaaggagatcccaggcgaacgtgggcacccttggtgtgaagtgtgacaggtcagaccagaccaaaggagactgctgtcttcagtgtgaggaagtgccttgctggcatttaaatatccaaaaaaatgctcctggaggtggatttagctcagaagctgtgttacaaatagagtgtaggcttttgggagggtctcagataggaccaatccctactctgctgagcctggatgtcttccttgtatggacggcaggcagaggagggtgacaggttctgagtgtgaatatcgactccaagtcttgattctgggctcttccctcagttggaagcaaggtgtccctggttctcaaggaggtccctatgtctaataaaagattgtgaaccccac

SEQ ID NO: 448 - DNA, 2681 bp, Rattus norvegicus
gggagccgatcggtgtgggctggtggagaaggcagcgggagtctgccgccccgaagtccaggtcccctcttcccactcccgcgccggccagcgctgcggctcccctctgccaccatgagaaacatcttcaagaggaaccaggagcccattgtggctccggccaccaccactgccacaatgcctctggcacccgccgcacctgccgataactctacagagagcacgggcaccggggagagccaagaagacatgttcgccaagctgaaggacaaattcttcaatgagatcaacaagatccctttgcccccctgggctctgattgccatggccgtggttgctggcctcctgctgctcacctgctgcttctgcatctgtaagaagtgctgctgcaagaagaagaaaaacaagaaggagaagggcaaaggcatgaagaacgccatgaacatgaaggacatgaaggggggccaggatgatgacgacgcggagacaggcctgactgaaggagaaggagaaggcgaggaggagaaagagccggagaacctgggcaaattgcagttttctctggactatgatttccaagccaaccagctcaccgtgggcgtcctgcaggctgctgaactcccggccctggacatgggtggcacgtcagacccttacgtcaaagtcttcctcctcccagacaagaagaagaaatatgagaccaaggtgcaccggaagacactgaacccagccttcaacgaaactttcactttcaaggtgccataccaggagttaggaggcaaaaccctggtgatggctatctatgactttgaccgcttctctaagcatgacatcatcggggaggtgaaagtgcccatgaacacggtggaccttggccagcccatcgaggaatggagagacctacaaggcggagagaaggaagagccagagaagctgggtgacatctgtacctccttgcgctacgtgcccactgctgggaagctcaccgtctgtatcctggaggccaagaacctgaagaagatggatgtggggggcctctcagacccctatgtgaagatccacttgatgcagaatggcaagagactcaagaagaagaagacgacggtgaagaagaagaccttgaacccctacttcaatgagtcattcagcttcgagatcccctttgagcagatccagaaagtccaggtggtcgtcaccgtgctagactatgacaaactgggcaagaatgaagccatcggaaagatcttcgtaggcagcaacgctacaggcacggagctgcggcactggtccgacatgctggcgaaccctcggaggcccatcgcccagtggcactctctgaagcctgaggaagaagtggatgctcttctgggcaagaacaagtaggcagcggcgcctggggccacgccccagaggacactgacgagctccagagctatcaatacctcagttatgcgaccttagaggtttcttcatttgtttgcggtgtgtcctgttttcctttcctttttctttttttgtctttttaaaaaccaacttccttttggtggctatgtgaagaggcccctaagacgtgaaagagaagcctggctctgttattgtcccaggagctgtccttgttgcatgccctatcacggttgcccctcaccccaagtggggccctctactgtcagagtggaagcacttcctgcttttcctgggttttggaccaacaaagtggcaagcacattctgtgtctcgactgtgtgtgtgtgtgtgtgtgtgtgtgtgtgtgtgtgtgtgtgtgtgtgtgtgtacacgtgtgcccatccatccccaccttgcctctgtttggaatatctcttcgtttctggaatgagtcacggacaatgatgccgtgtgagagaggaaagtcttcaggtactccgaggtgaggagagcccactgcttaagtggtcagaggccagaagctctcatagtccttgcgaaaggccatttggaagacgcaagatgtgatactggatgtattccgaactaggaccaaaggcttgatgccatcccagactccctcttgtcagtcatggcttccccaggagtggggctttgggatcattcatgaaaataaactatttactcgactggtcggattcagccagggaccgccagctccaggatgtcattcttgttgacgacatcaaactttgaagaaacagaagtcccattactcagctctggatctttgcctcgtccagtgggaggcagatgcttcctccctctgcagagtacaagcagtgcgttcatttgcattcacgcaccatctgcttttgcctctgtttccctttttgtgtaagtggaaaaataccatctgacgataagtgctttgcacagagccagagacctattagagggatgcttgggtgtttagttcccttgaggtccaggtaaggaggaggtgtcaagaaggggagcgttggtggacagtgacaagctagacattgcagagctcctcacaactcctattcctgaccctctggaccctttgaccctcagtgatggtagccggagtagcccaggcagaccttaggagaggccccgtccttcccttccttagacagttttctcagaatgccaggaaacacagcgcattcatttcagatgggtggtggagaaaatgtgctaaggtttgcaccctatgttcggaattc

SEQ ID NO: 449 - DNA, 5480 bp, Rattus norvegicus
ggatcccctttgctatgtagtttttaatggaaattacaacccatagtgtgttgataaatagagagtcctgtttggtttaagcaacctctgtttctcataaactccataaaaacaggaatactctttgtttctagcataaccaaaagatttagtgaattgaaaacaatgttcccttagagtataggtctaataaccccgaaaatattaccatgatactgagcatttgtaagtatctcatagcatgtagtatccatagtccatcaatgagagagacatttaacatgattttcattaatcaggtggaaaagacatgacaacattcacaggcactgcacagaacatagtggtccaccttgcacatatttcactaaactaggtttatctattttgttgctttctctaacatctctgcaatgaagcaggtcaacagtgccacatatcctttacttaacctaaggaacacaaaaaattttctacatatatcctggttagagagtgcttaaaataagttttccaagaatggaaaagaaatgttctgacttaacaattaagacagtatttatttaaagcaagaaatatgaggcacacaagaaaatattttgggaagaaaccatttggtgaacaatatttcaaataaaaatagacaaacatagttaattgtaaaacatatgtttgaccagcccttcttttcaataggcttaatgtgaataaaatgttaaagattctctttgggtggctgcaaattgtccacgaataagacaaaatataaaaataaggactgagtctcacaaaatgaaaaggaaatatattcagaaagagaatcttgagagaatgtgttgtcacaaattaaagaaaacctgtggtgaatgacatcctgaggcctgagctattactgacatttaagataaaggtaactgtatacatttgtcccattgaggggacaagaaagctgctctcatgttcagctctataattcttgccttaaacaacttaaatagaatgatttaaaatatggagctgtccatggacctttgaaatataaaatagtcaagcaacttatcaaggaattacagattccttgatactaacacaggtaaatcccacacgtgttttgagactacatttgctgggattttattgatgtaataggtcacatgtttttcgggccaatgttgctgttattcggttacttcaagagaatagtggcaactgatgctatgtattctaggggtttgaagtgatgtttcatgattgaaatttgtaaaagaataacatcatcattcttaacaatagaacatataaagtcacacagaagtgacagtgtttaagctgtactattgatcaaagaaatttattaccttcagtttcaatggaaataattactgataatacaaacatgtgtgaacacacactaatcctatccaaatgcacagtgatacacagaaaatattagcaagtagaatgcaatatttatataacgattgtatttatcaatcaattgtatgtatcaatatatgggctattttcttacacatgattttattcaaatttactctaatcattgttgaaccatttagaaaaggcatactggcaacttttccttacctcatccagctgggcaaaagtcccagtgtggagtaaaggatgcaagatttcctgctctgttaagtataaaataatagtatgaattcaaaggtgccattcttctgcttctagttataaaggcagtgcttgcttcttccagcacagatttgggagaaactacagagcctcttccaagatgctggtggccctcctcacaatggtcctgctgggcctgagctttgctcaggaaccaggtgaaggtctgagaatatgggtgttggtgctgtggctcttcttaaataataagagaaaatactgcaaggtaggagagagatgagacagaggacaggagatgaaagataaataagaccacacacagtgctttagtttttaaaaatggatagtcttggatttgaggacactgttatagttaaaatacactacatatgtgtgtaatgttgctatactatttactaagtaaaggtggcagaaatacccatgaaagaaccatttaaagaataggagatgaaggaaagaaccatttaaagaataggagatgaagtaaaacctattacatctattacacagaaaagaataacatcttctgaattttcatttttccatactcattcaaaattccaatatattatcagtgtgtttttaattatttattcaaatgtttatttatattcccttactttgagaacgtcagaaaggtagaagataagaattaaataaggaagagattgcatagaggtagaatatacaaacattcttatacatacatggcttatcagtgtatgcagaaagattctatgtaaaatagtgacaaccaagagacttttattttgttacttactggtagacactcaaaatatatttaccagagacgccttcaaattactggtagacactcaaaatatatttaccagagacgcttcaaattactgctagctgctcattttcctaacggtgtttataaattatcaggaaatgagattgtagctaaaatcacctgccacctgtaaattgctagttgtttttgtgaactcacttttgaatctgtcctttgttttgcttcacaatggccatctctgaacactctttcccaattacatcaagcaaatacaaataatctttaaaattcttatgtatctttagtaagcaggatgttttataattctacactttattgttattttggcttttatgaattaataaatgtaagtttcacaaaggttcagccaaacattctccaaatacgataatgatgaacactctagggtaatgcagtaaattaaaataaactagaggtctgaattacctgagaaaaaaaagcaatttactacaacagagaagtagttgacttgacaaataaaacttagttcagtgtccctattttgactactctatggaaagaggagttcctcaatgtcttcttccaaacccttgttgcctgtatttcagttgatttcaacagaaaaaaagtactcaaatgtacttttctcttttcaaatgtctcttttctttgtgactctatactcaaagaaatgtattgagcctattgattataacctctgatgaatttgttcagtgaatactgtatggttggtaatttttagacttgtcttcccctcataatattcatcaacagcagggccaattttcagagctatctgcttggttgaatttttaccatgacacatattgatttgatctggattcccaaagtcaatttcccccaaaatataatagtcagtgaaatctccatatgtgagctaatttacttgttttattttgtctgagaaaaatgatcatgaatactcttgaaactgaattatgtgtacttgcatgtgaccaaaagaccatgtttaacatgaacttttcatgaaactataaacaagtgctatctagaaaaaatgctgtgtgaaaaagtcattgaaataaaaaagtccagtatatctaagctcatatgtcatttgcttttatcactcagaacttcagaacctaaaccaggtccccaatcagaggccaccaccttcaggattcctaccaagaccacctggtaataggaaccagcaaggcccaccaccaaaaggaggcccacagcagagacctcctcaaggcccacccccaccaggaggtccacagcagaaacctcaaggcccacccccaccaggaggcccacagcagagacctcaaggcccacccccaccaggaggcccacagcagggacctcaaggcccacccccaccaggaggcccacagcagagacctcaaggtccacccccaccaggaggtccacagcagggacctcaaggcccacccccaccaggaggcccacagcagggacctcaaggtccacccccaccaggaggtccacagcagagcccccctcaaggtccacccccaccaggaggtccacagcagggacctcaaggcccacccccaccaggaggtccacagcagagcccccctcaaggtccacccccaccaggaggtccacagcagggacctcaaggcccacccccaccaggaggtccacagcagggacgtcaaggtccacccccaccaggaggccctcagcaagatcctcctcaaggcccacccccaccaggaggcccacagcagagacctcctcaaggcccacccccaccaggacgcccccaacagagacctcctcagcctggaaaccaacaaggccctccacaaggtccccagtctggcagacctcagggacctcagcaaaccagatatcagtgaaaggtatgtttcatgttaatgccctggtgggtggcagggagcagaactcttctatatttcacattatttaaagtatacaacttaaatatgtagtaacattgtcctggacccaatatcaaatatttttattaactattgaatgatcttttcatgagagaatatatgcttttggaggaatatatcctcctcatttggttttcaacaattattttattaattacctccttctggcaagaagacccgttttcttcctaaggtacttttcctcctttatgggattcatgtatgcaaaaggatacacagatctcatcatgttctttgttcttatttttctttcttttaccacaaactaaattcttatgattgacatatcatgttctctctataccctgcctttgtgatcttttttcttttgaatttcagaaactaagaaagtggttccctcacactcttcttccactgccaccacaggatgagaactggatcttcattcactgcattaataaaatgatcagcatgcaacttctgattggtgtatttctttcttggtcttcttcctcctgcaatatcaggactcacaattacctaaaatcacccatattctctcaggcttcagcctgtaatttctcccagcaactgtccataagccaggtaccaggtaccaggtcttttactgctgtgtttctgcctgagtcataaagcagacactctcttcccagagttgtgtagtatctatctctgaaaatgggtgtttgggtgttgctttgcctaatctggggtgcaaggtcaagcagctatgaaccaaatgccttccaaaagggtcgtggtgcatatggatgtgtcctggggcaccagtgtgtctcagagaaagggaggaatgaccaaacatctttggaagaagtagtaggctgataggctataatcactgatatactggtctgcagtggctataggtcatccaaggtagatagcagagttttcaagacatggctgcacccttgtgttgtcttactcatggtttcatgtcctctacaaaacatcatggccaagaagcaagttggagtggaaaggacatattcaccttacaattccacatttctgctcacaaccaaaggaaattaggactggaattc

SEQ ID NO: 450 - DNA, 4795 bp, Rattus norvegicus
ctgcagcacagccctgcccttctcttgccctggagccacaaccctctttacagctcctagggatctgattcgctttgacctcccactgggtagcccgatcttgggctggttataaagtccatgagcctgactcagacctgtccggaatctccaatgggggccatggcgccgcccttgctgctcccgctgctggtggctgccctggccccgactcagacccaagccggtgagtgcggggtcctgagggaaatggcctctggggtaggggcgggggcggcaccggggaagaccggtccccgcgtcgaacaccagaccctccgccccttctccacccgcgacccgagccccgcgccctgctcccggcccggcccgcgcacccgcccggggtcccggtaggaggtccgggtctcaccgcgagccgcccccaggctcacactcgctgcggtatttcaccaccgcggtgtcccggcccggtctgggggagccccggtaacggaagtgggctatgtggacgacacggagttcgtgcgcttcgacagcgacgcggagtatccgaggatggagccgcgggtccggtggatggagcgggagggcccggagtattgggagcgggagatgcagagagccaagggcaaccagcagtggttccgagtggacctgaggaccctgctccgctactacaaccagagcgagggcggtgagtgaccctgggacggaggtcaggatccctccgcgtccccacacagcaggaaacgtcccgggtcccaagtccgagtttcaggagctgaacccacccgagcccgccctttcagtttggaggagtccccgggtgggcggggcgggggcggggcgggggcgggggcggggcgggtgggcggggactgaccgctggtcccgcaggctcgcacaccttccaggtgatgtctggctgtgacgtggggtcggaagggagcctcctccgcaggtatgagcagttcgcctatgatggccaagattacatcgccctgaacgaagacctgaaaacctggacagcggcggacacagcggcacggatcacccggagcaagtgggatcaggctggtgatgcagattattacaaggcctacctggagggcacgtgcgtggagtggctccgcagatacctggagcacgggaaggaggcgctgctgcgtctaggtgcggagatgcgggcttctcctccctctgccctcgggctgggtctcactcctgggaaagaagaaaccctcagctgggtgatgcccctgtctcagaggggagagaatgtccctgggtctcctgatccctcacgacagtgactgcactgcctctcccagggcccagccttctccctggagagttctgagtccctctcaggtgggaaggagagaacttccccactgaacagcaagggctccctgctgtcagccatggcctctcccaggccaggttctctgcccacacccactcactgaggacactgactcctgtcctgctgagtgtgtcagcccttcacacctcaggaccagaagtctcctttatctcagaggagacatggactccactacactaggctggttctcccagtctatagaactttccaaagaatacattctcacagatccctccctgatgtggggtttgcctctcttccacaccccatttctctctattcctacagtggagaatggtcccatgagcccttatggggtaccctggaggatataaactgtgggatttctttttctttttttctctcttttttcttattttctttttctttttatttttttcctttttttttttttttggaaggcattatttttcttctagtcaggttttctctgcaaacacatatttaataaattattttccattccctcttctgttctatgaccacccatctcatgctatagaacatcacataaggatggccatgttgacccactggctcatgtggattccctcttagattctgagtccctcaggaaagtgtgcagttctgtgctgagggcaccagctctctagtcgatgacagttgaagtgtcagacacacacagttcagtgtcatcattgatttaactgtgtcttgtgtagatttcagtttgtcttgttaactgtgtgatttcttaaatcttccacacagatcccccaaaggcacatgtgacccttcaccccagacctgaaggtgatgtcaccctgaggtgctgggccctgggcttctaccctgctgacatcaccctgacctggcagttgaatggggaggacctgacccaggacatggaacttgtggagaccaggcctgcaggggatggaaccttccagaagtgggcatctgtggtggtgcctcttgcgaaggagcagaattacacatgccgtgtggagcatgaggggctgcctaagccgctttcccagagatggggtaaggagggagccttctatagaccctgagctggtcagggctgagagctggggtcatgacccccaccttcatttcctgttcctgtccttcccagagtctcctccatccactgactccaacgtggaaaccattgttgtttctgttgttcttggagctggggccatcattggagctctggtggctgttgtgaggaagagatggataaaaacaggtaggaaagggcagggtctgtttcccctcagcttcctttagaagagcgctctgctcattaataggaaacatggccacaccctccatgctactgtctccaactgggtcctctgtcagttctggaaacttcctcctgtcaaaacattcagtgaaatcttacatatttccttctcacaggtggaaaaggaggagtctacacccctgctctaggttagtgtgggggcaggagtgtccctgagggtattggagtgaagctggagatgttgggagctctgggaatccatagtagctcctccagagaaatcttctgggggtgtcagttgtaccgtgatatgaatacatacatacacatatacacatacatatcttttgttttaccctagtataccctgtgcagtgacagctcccatcatctcttatgtgtctttctcagattgtaaaggtaactctgggtctgactggggaggggcaatgtggacatgattgggtttcagggactcccagaatcccctgtgagtggagggttgttgggctgttgtcttctcagtgatggtttatgactctcgttctctagcatgaagacagctgcctggagtggactgagtgacagacgatgtgttcaggtctctcctgtgacatccagagtcctcagttctctttagacaccagtgtctgatgttccctgtgatctatggcttctgtgtgaagaactgtggagcccagcctgccctgcacacctggacactgtccctgcactgcctgtgttcccttccacagccaaacttcctggtccagcctgggggagagagagagagagagagagagagagagagagagagagagagagagagagagagagagagagagagagagagagagagagagagagagagagcagcagagagagagagagagagagtgtgtgtgtgtgtgtgtgtgtgtgtgtgtgtgtgtgtgtgtgtgtgatatctgtatcttgggagctccatggagccctgagctgcagctcctcacttccacactgagaataatgaatctgagtgtgaacttgattgttcacatacttgacccaatgtagatattttttttaattattggattgaatacttagaggttttttgttctggggtcttgttttgttttgttgataaaaataattggcagatggagaagtttccagaatctgtgtcacaagctgtgtgtatctggtgggacagtgtgaggctgtgggagctgagtgtggacaggctgtgcccaggtgtgctcagtcagttcttgtcattgatggactcaggtctcagctctgtctcctccaggctgtgccctctccatcactgtgaagacatggggagagtctgtgatcacaaggacacagggaaggccagagccttgtccttgtcctgtccccaggattatgagcccccagggctgaagatcagagactcaagtggggtcctctaaagtgcagggtgcacaagatgagtcactacatctcctcccactcacttgatttagctgctaatgatggggtcgggaatctgccctgggctctccctgtggccatgctgctgtggtgatttctgcttctcctttctggtgtctttcccagggttctcagggtctggtgtgatctgtctgctcatctctcaggaccacctccacagctgagataagacctaacagagaggcttctcccctgtaacttgggtaccgattcctgaaccaggactgtcttaccttttccgtcttgtgttctggagttaactccctgaagtctcttaatctccacccccagctctgtgcacctgggtcttgcagctgatgcacctgtggttgctctgcctttggatggctctgtatggcaggagagcaaagtccccctcagaggcctgggaccatttaaatcatctcatattcatagcactaaagacacggaggcagaagctgagggaaaaacctgacagctcagcaaggaaactttattttcttaactacatacgggatatctatttaccagcctgatgctacaactaaactccagcccttcagatatctgtctgtgtcactctatcagtccagtctgcctttctcttgagctcctgcaaacccaagagggctcctgagctctctttcccggatttatattttatctgtgtcctgccagct

SEQ ID NO: 451 - DNA, 2748 bp, Rattus norvegicus
ccggaagcccgaagcaccggagtcccgcagaacctgactccggcctgtcaccaccaccaaaggctaggggacgtcgcctcggtcactatggggctcctgctcaagcctggagcgcgccagggcagcggcacctcctcggtcccagacagacgttgtccccgctccgtcttcagcaacattaaggtatttgttctttgccatggcctgctacagctctgccagctgctctacagcgcctacttcaagagcagtctcaccacaatcgagaagcgctttgggctctccagctcttcctctggtctcatctccagtttgaatgagatcagcaacgctaccctcatcatcttcattagctacttcggcagccgggtcaaccgcccacggatgattggcatagggggtctcctcctggctgcaggggcctttgtcctcaccctcccacacttcctgtcagagccctatcaatacacctcgaccacggatggaaacaggagcagctttcagactgacctctgtcagaagcatttcggagccctgccccccagtaagtgccatagcaccgtgccagatacccacaaggagaccagcagcctgtggggcctgatggtggttgctcaactactggccggcattgggacagtgcccatccagccctttgggatctcctacgtggatgactttgccgagcctaccaactcacctctgtatatctccatcctattcgccatcgctgtgttcggaccggctttcgggtacctgctgggctcagtcatgctgagaatcttcgtggactacggcagagtggacactgctaccgtaaacctgagcccaggtgaccctcggtggattggagcctggtggctgggcctgctcatctcctcaggcttcttgattgtcacctctttgcccttctttttctttccccgagcaatgtccagaggagcagagaggtctgttaccgcagaggaaacaatgcagacggaggaggacaagtcaagaggctccctgatggatttcattaaacggttcccccgcatcttcctgaggctgctgatgaacccgctcttcatgctggtggtcctgagccagtgtaccttctcctcagtcatcgctggcctctccacgttcctcaacaagttcctggagaagcagtatggagccacggcagcctatgccaacttcctcatcggtgctgtaaatcttccggctgcagccttggggatgctgtttggaggaatcctcatgaagcgttttgttttccctctgcaaactatcccccgagtggctgccaccatcatcaccatctccatgatcctctgtgtacctctcttctttatgggatgctccacatcagccgtggctgaggtctaccctcccagcacatcaagttctatacatccgcagcagcctcctgcctgccgcagggactgctcgtgcccagattccttcttccacccagtctgtggagacaatggagtcgagtacgtttccccttgccacgccggctgcagcagcaccaacacaagctcagaagcttctaaggaaccgatctacttgaactgcagctgtgtgagtggaggatcggcgtcacaagacaggctcatgccccacgtcctgcgcgcactactgctcccgtccatcttcctcatttcctttgcggcgctcattgcctgcatctcccacaacccgctctacatgatggtccttcgcgtggtgaaccaggatgaaaagtcgtttgccattggggtacagttcttgttgatgcgcttgctggcctggctgccggctccatccctttatggcctcctcatcgactcctcctgtgtccggtggaactacctatgctcagggagacgaggggcctgtgcgtattatgacaacgatgctctccgaaacaggtacctgggcctacagatggtctacaaggccttgggcacactgctgctcttcttcatcagctggaggatgaagaagaacagggaatacagcctgcaggagaacacctcaggcctcatctgaccctcagctgggactactgccccaccccagagactggatcctatcccttccacacctacctgtattaactaatgtcaacatgccttcctcctcctcttcctcctcctcctcctccttcttcttcctctctctctctctctctctctctctctctctctctcacacacacacacacacacacacatgagagagagttcactcaccctttgagatcacctgccttttctcttctgcctaaagtcttaaggcctgaagtacactgagctgaatgagcaccgggcctgagagtttagtttctccaagtccttggaaggtatccccagcgtaggccctacgtcctccagacaagatgcccataatgaggcggcctctgttttcaccagtgtctcaggaatacttaatggagtgaaaagagggagtcttgccttcttgggccaggcagcccggatctcctctgcctctgcccacacccaggagagccagaggagaagcaggtagttggtttcttatctgctccagcggggctaagggagctgggtgtgtccacttttcatctggattccgtctagcatgaaagccgtgccctcgaggctgttttggaaaccaccattttgggaagtatccctctctataaactatgccccggtatctgaggaggaatgaagggaggaacaaggctggatcatggaaaactgttcacaggaaccagaggcctatcctcccgtcggg

SEQ ID NO: 452 - DNA, 1566 bp, Rattus norvegicus
cccaggctatgaacccctagtctctccacacttcatctgctacaacttccggcttagacatggaaattctttgtgaagacaatatctctctgagctcaattccaaactccttaatgcaattaggtgatggcccgaggctctaccataatgacttcaactccagagatgctaacacttcggaagcatcgaactggacaattgatgctgaaaacagaaccaacctctcctgtgaagggtacctcccaccgacatgcctctccattcttcatctccaggaaaaaaactggtctgctttattgacaactgtcgtgattattctcaccattgctggaaatatactggtcatcatggcagtgtccctagaaaaaaagctgcagaatgccaccaactatttcctgatgtcacttgccatagctgatatgctgctgggtttccttgtcatgcctgtgtccatgttaaccatcctgtatgggtaccggtggcctttgcctagcaagctctgtgcgatctggatttacctggatgtgctcttttctacggcatccatcatgcacctctgcgccatctccctggaccgctatgtcgccatccagaaccccattcaccacagccgcttcaactccagaaccaaagccttcctgaaaatcattgccgtgtggaccatatctgtaggtatatccatgccaatcccagtctttggactacaggatgattcgaaggtctttaaggaggggagctgcctgcttgccgatgacaactttgttctcataggctcttttgtggcatttttcatccccctaaccatcatggtgatcacctacttcctgactatcaagtcacttcagaaagaagccaccttgtgtgtgagtgacctcagcactcgagccaaactagcctccttcagcttcctccctcagagttctctgtcatcagaaaagctcttccaacggtccatccacagagagccaggctcctacgcaggccgaaggacgatgcagtccatcagcaatgagcaaaaggcgtgcaaggtgctgggcatcgtgttcttcctgtttgttgtaatgtggtgcccattcttcatcaccaatatcatggccgtcatctgcaaagaatcctgcaatgaaaatgtcatcggagccctgctcaatgtgtttgtctggattggttatctctcctcagctgtcaatccactggtatatacgttgttcaataaaacttataggtccgccttctcaaggtacattcagtgtcagtacaaggaaaacagaaagccactgcagttaattttagtgaacactataccagcattggcctacaagtctagtcagctccaggtgggacagaaaaagaactcacaggaagatgctgagcagacagttgatgactgctccatggttacactggggaaacaacagtcggaagagaattgtacagacaatattgaaaccgtgaatgaaaaggttagctgtgtgtgatgaactggatgctatggcaattgcccagggcatgtgaacaaggttatacccatgtgtgtggggcggggataaggaggctgcaacaaattag

SEQ ID NO: 453 - DNA, 2256 bp, Rattus norvegicus
cgagagccggacgggcactgggcgactctgtgcctcgcggaggaaaatcaactaaacatgggcaaaggagatcctaagaagccgagaggcaaaatgtcctcatatgcattctttgtgcaaacctgccgggaggagcacaagaagaagcacccggatgcttctgtcaacttctcagagttctccaagaagtgctcagagaggtggaagaccatgtctgctaaagaaaaggggaaatttgaagatatggcaaaggctgacaaggctcgttatgaaagagaaatgaaaacctacatcccccccaaaggggagaccaaaaagaagttcaaggaccccaatgcccccaagaggcctccttcggccttcttcttgttctgttctgagtaccgcccaaaaatcaaaggcgagcatcctggcttatccattggtgatgttgcgaagaaactaggagagatgtggaacaacactgctgcggatgacaagcagccctatgaaaagaaggccgccaagctgaaggagaagtatgagaaggatattgctgcctacagagctaaaggaaaacctgatgcagcgaaaaagggggtggtcaaggctgagaagagcaagaaaaagaaggaagaggaagacgacgaggaggatgaagaggatgaggaagaggaggaagaggaggaagacgaagatgaagaagaagatgatgatgatgaataagttggttctagcgcagtttttttttcttgtctataaagcatttaacccccctgtacacaactcactccttttaaagaaaaaaattgaaatgtaaggctgtgtaagatttgtttttaaactgtacagtgtctttttttgtatagttaacacactaccgaatgtgtctttagctagccctgtcctggtggtattttcaatagccactaaccttgcctggtacagtctgggggttgtaaattggcatggaaattaaagcaggttcttgttggtgcacagcacaaattagttatatatggggacagtagtttggtttttggtttctttttttttttttttttggttttgttttttttccttttgttttttttttccatcttcagttgtctctgatgcagcttatacgaaggtaattgttgttctgttaactgaataccactctgtaattgcaaaaaaatggcggctgttttgttgacattctgaatgcttctaagtaaatacaattttttttattagtactgttgtccttttcataggtctgaaagttttcttctcaaggggaagctagtcttttgcttttgcccattttgggtcacatggattattagtgtgtatcttcatatagttggaaaaatcttttgtccacacaccctgcatattgtggtaggggtaacattttcatctacagttgaagaattctccaaaattgtgatcagttggataagagatactctacttagcaaagcaaggagtgatcaattctgtcacaccatgggattattagatcaaacagtctgaaagtctgtccttgaaggactaatagaaaagtatgttctgctccttacctgaggactcctttaactgccattactgtgtaatgacagttatattttgcagtttcccctactaaagacctgagaatgtatccccaaaagcgtgagcttaaaatacaagattgctgtactatttgttgaccttagtcccagcgaaggctatcatgagaagctggctgtaatgcctttgcccttctatctaaatacggattgctcaggaaacttgactgtttaaaggtatatttaattagttgagccagcttttaaaattatgccacatttaaaatgaagggtatattttcctatattgtggtttgtccctttataaatcagatacaaggaaagcggataaactttgcatattagtaccagttgtccaagccatttgctttttctttataaagcccgaactcattcattaatcatgtttaatctgcttagtttagggaacaatttggcaattttgtgggttttctttttttctttttcttttttttttttttttgagattatcattctcttaaagtgccagtgttttaaaatagcgttcttgtaattttccgcgcttttgtgatggagtgctgttatatcattttgacttgggttctttacagttgcctttgttctgtaatttgaggaggaatactgaacatgagtcctggatgatactaataaactaataattgcagaggttttaaaaaaaaaaaaaaaaaaaaaaaaa

SEQ ID NO: 454 - DNA, 1717 bp, Rattus norvegicus
gaattcggcacgagtacagaaggtaaaggctgtctctatggagccactggccatcctggtgctgctgtgctttccgatctgctcagcatatcctctgcatggggcagtgagacaagaccactcaaccatggatcttgctcagcaatacctagaaaaatactacaactttagaaaaaatgagaaacaatttttcaaaagaaaggacagtagtcctgttgtcaaaaaaattgaagaaatgcagaagttccttgggctggagatgacagggaagctggactcgaacactgtggagatgatgcacaagccccggtgtggtgttcccgacgttggtggcttcagtacctttccaggttcacccaaatggaggaaaaaccacatctcctacaggattgtgaattatacactggatttaccaagagagagtgtggattctgccattgagagagctttgaaggtctgggaggaggtgaccccactcacattctccaggatctctgaaggagaggctgacataatgatctcctttgcagttggagaacatggagacttttacccttttgatggagtgggacagagcttggctcatgcctacccacctggccctggattttatggagatgctcacttcgatgatgatgagaaatggtcactgggaccctcagggaccaatttattcctggttgctgcgcatgaacttggtcactccctgggtctctttcactcaaacaacaaagaatctctgatgtacccagtctacaggttctccacgagccaagccaacattcgcctttctcaggatgatatagagggcattcaatccctgtatggagcccgcccctcctctgatgccacagtggttcctgtgccctctgtctctccaaaacctgagaccccagtcaaatgtgatcctgctttgtcctttgatgcagtcaccatgctgagaggggaattcctattctttaaagacaggcacttctggcgtagaacccagtggaatcccgagcctgaattccatttgatttcagcattttggccctctcttccttcaggcttagatgctgcctatgaggcaaataacaaggacagagttctgatttttaaaggaagtcagttctgggcagtccgaggaaatgaagtccaagcaggttacccaaagaggatccacactcttggctttcctcccaccgtgaagaagattgatgcagctgtttttgaaaaggagaagaagaagacgtatttctttgtaggtgacaaatactggagatttgatgagacaagacagcttatggataaaggcttcccgagactgataacagatgacttcccaggaattgagccacaagttgatgctgtgttacatgcatttgggtttttttatttcttctgtggatcatcacagttcgagtttgaccccaatgccaggacggtgacacacacactgaagagcaacagctggctgttgtgctgattatcatgatgacaagacatatacaacactgtaaaatagtatttctcgcctaatttattatgtgtcataatgatgaattgttcctgcatgtgctgtggctcgagatgagcccagcagatagatgtctttcttaatgaaccacagagcatcacctgagcacagaagtgaaagcttctcggtacactaggtgagaggatgcatccccatgggtactttattgtttaataaagaactttatttttgaaccat

SEQ ID NO: 455 - DNA, 616 bp, Rattus norvegicus
gtacgtgctctggaacatgcaggcccaggacggagaaggaggcgtcctgctcctgccagccttaagatgggaattttagggtctggacatcactggtgctccaggtcagctttcctggttgcagatctctcctggtcaaggctcccagctcgcctggatcccacaactgcacagtgtcccgcccaggagtgaaggatgccactctgggtgttctttgtgctcctcaccctcaccagtggctcccactgctcactgcccccctcacctcccttcagggtgcggcggcatgcagacgccatcttcaccagcagctaccggagaatcctgggccaattatatgcccgcaaactgctgcacgaaatcatgaacaggcagcaaggggagaggaaccaggaacaaagatccaggttcaaccgccatttggacagagtgtgggcagaggacaagcagatggccctggagagcatcttgcagggattcccaaggatgaagctttcagcggaggcttgagccctcggcccccaaacatagctggaccctgttacttctacttcagttctgatcttctccttcctctgtgaatacaataaagacccatctcatctgcaaaaaaaaa

SEQ ID NO: 456 - DNA, 2977 bp, Rattus norvegicus
gaattcggcggatggaagccagctgtcccgagaagcagtgaactgtggcgtcatcccgagcagtgccttaccggtattgtgctgcttcacctgcctcgctcggcgttctcctcaggccccgccatggagcgacaggtccaacgacttcgccagacgttccggtccggccgatcgcggccgctgcgtttccgactgcagcagctcgaggccctccggaggatggtgcaagagcgagagaaggacatcttggcagccatcgcagcagacctgagcaaaagtgaactcaatgcatacagtcatgaagtcattaccatccttggggagattgacttcatgctggggaatcttcctgaattggcctctgctcggccagcgaagaagaacctgcttaccatgatggacgaggcctatgttcagccagagcctctgggagtcgtgctgattattggagcttggaactatccttttgttctgaccctgcagccactggtgggagccattgctgcaggaaatgctgccattgttaagccctcggaactcagtgaaaacacggctaagatcttggctgaactcctccctcagtatttagaccaggacctgtacatgattgttaatggcggcgttgaagaaaccacagagcttctgaggcagcggtttgatcacattctctacacaggaaacaccgcagttggaaaaattgtcatggaggctgctgccaagcacctgacccctgtgaccctggagctcgggggcaaaagcccatgctacattgacagagactgtgacctggacgttgcttgcagacggataacctggggaaagtacatgaattgtggtcagacctgtattgctcctgactatatcctgtgtgaagcctcctcccaggatcaaatcgtacagaagattaaggatacggtgaaggacttttatggggaaaatgtaaaagcttctcctgattatgaaaggatcatcaaccttcgtcactttaagaggataaaaagtttgcttgaaggacagaaaatagcttttggtggggagactgatgaagctacacgctacatagccccaaccatactcactgatgttgaccctaactccaaggtgatgcaagaagaaatttttggaccaattctcccaatagtgtctgtgaaaaatgtggaggaagccataaatttcataaatgatcgcgaaaagcccctggcactctacatattttctcacaacaataagctcatcaaacgggtgattgatgagacatccagtggtggagtcacaggcaatgatgtcatcatgcacttcactgttaattctttgccctttggaggtgtgggtgccagtggaatgggggcttatcatggcaaatacagtttcgataccttttctcatcagcgcccctgcttgttaaaagggttaaagggagagagtgttaacaaactcaggtaccctcccaacagcgagtccaaggtcagctggtcgaaattcttcctgctgaaacagttcaacaaaggaaggctgcagctgctgcttctcgtgtgcttggttgcggttgcagctgtgatcgtcaaggatcagctgtgatgacttccttgtagcctctactgaagtacccctcggccaaatggttaacacaccaatgcttttaaaattgtacccaaaccaggaaatgaaattcacaggtgaactgcagtcaaacctaagttgttgccacaaaccactgatgaaactcagtgcttcagccaaatcccagcatttgtcagccgtgcaggtgctgagagggtggagactgggaggggcgacacctagtccatggcagcgggatgtcagggagactcgacaactgctcccgcactctttgctccaggacatagctctcccacccggtgtcaacaccctccaggctttccagctgtcctctgattgctgaggttcctgttagggacccaggtactaaacctgggcgggtggatttgtcggcctcatccattgtggctcgagaccggccttcgggagtcggctctcagtctaaacatcctttctcattcatagtgtgtcacccgaagatgcttgtttgtgacattgtgacagtctgtcatgactgtcccggtgcctttgtgatgacttaaactacactgaggagcttgccaacttgtgaatgcccttcagagggtctggcagtcacagctgttccagagcccgagggacgaagattccggagcccggagtttgaggccaacctaggcaacataatgggaccctctcattattattcctccataacaatcccctcgagaccctcgatttgaatgttatataggtcttcaggataaatctgcttattttcacagcacaacacaaaaaaaatttacttttgaaatcttagagagattcctacagatcttagcatggagctgttcctgtagtgaaaggggggttattagacatgaggcttcagaactcatggggcagggttgttggagactaccgtgagctgagggggcacactgaagcgatgggatggccagaagcgcacctgagcaagcggggcagcattctctgtcagaccctaacatggctacacggggatgtggcagagagatctgtgccgttggctgccagcgctggttaggcctgaagctccaagctgcagaggtctcattgccttcccaggatccaaattaagactgcccactcaatgagaatgtcacttgcgtatgtacaaccatgtttgctgagtaacctgttccaccgttgaggctgtctgaagtgtattgtatgaggtatcaagaacgagtcattggcccatttggcaaatagttgcttatgtagcaattgtcatggactaatcataaaatattttgcacaaaatttcaatgttgaacttgcactcactgttgttaaattataaatcacagcttctagttaggccaaaatatttacatactctactaatcttcaaaataaatgtatcccggaattc

SEQ ID NO: 457 - DNA, 3636 bp, Rattus norvegicus
ggagcctcggcgggaggaggcggacacgtggcagcggcggcggcagcggcagcagcagcggcggcagcagcggcggcctcggtccggggcgccggccgtcctccctctttcctccggcggcagccctagttcccgcctctcggctcccccggctccactctcccagccgggagctgctctctcctctttctagtctccagccacaggacccggcgcggggcccgcagcgccgccaccatggggaagggggttggacgagacaagtatgagcccgcagctgtatcagaacatggggacaagaagagcaagaaggcgaagaaggaaagggacatggacgaactcaagaaggaagtgtctatggacgaccataaactcagcctggatgaactccatcgtaaatacggaacagatttgagccgaggcctaacacccgcaagggccgctgagatcctggctcgggatggccccaacgccctcacgccccctcccactactcccgagtgggtcaaattctgtcggcagctgttcggtggcttctccatgttactgtggattggagccattctttgtttcttggcttatggcatccgaagtgctacagaagaggaaccaccaaatgatgatctgtacctcggggtcgtgctgtctgctgtcgtcatcataactggctgtttctcctattatcaagaagcaaaaagctccaagatcatggaatccttcaagaacatggtccctcagcaagccctcgtgattcgaaatggagagaagatgagcatcaacgcagaggatgtcgtcgttggtgatctggtggaggtgaagggcggagaccgaatccctgctgatctcagaatcatatctgcaaatggctgcaaggtggataactcctcactcactggtgaatcagaaccccagactcggtccccggatttcacaaacgagaaccccttggagacaaggaacattgccttcttctcaaccaactgtgttgaaggaactgcacgtggcatcgttgtgtacactggggatcgcaccgtgatgggcaggatcgccacccttgcttctgggctggaaggcggccagacccccattgctgaagaaatcgagcacttcatccacctcatcacgggtgtggccgtgttcctgggggtgtctttcttcattctctctctgatccttgagtacacctggctcgaggctgtcatcttcctcattggtatcatcgtagccaacgtgccggaaggtttgctggccaccgtcacggtatgtctgacgctcactgccaagcgcatggcgaggaagaactgcctggtgaagaacctggaagctgtggagaccttggggtccacatccaccatctgctccgacaagactggaactctgactcagaaccggatgacagtggctcacatgtggtttgacaatcaaatccatgaagctgacaccacagagaatcagagtggggtctcctttgacaagacgtcagccacctggttcgctctgtccagaattgctggtctctgtaacagggcagtgtttcaggctaaccaagaaaacctgcctatccttaagcgtgcagtagcgggagatgcttccgagtcggcgctcttaaagtgcatcgaggtctgctgtggctccgtgatggagatgagggagaagtacaccaagatagtggagattcctttcaactccaccaacaagtaccagctctccattcacaagaacccaaacgcatcggagcctaagcacctgctagtgatgaagggcgccccagaaaggatcctggaccgatgcagttctatcctcctccacggcaaggagcagcccctggacgaagagctgaaggacgcctttcagaatgcctacctagagctggggggccttggagagcgtgtgctaggtttctgccacctccttctgcctgacgaacagtttcccgaaggcttccagtttgacactgatgaagtcaatttccccgtggataacctctgcttcgtgggtcttatctccatgattgaccctcctcgagctgctgtccccgatgctgtgggcaaatgccgcagcgctgggattaaggtcatcatggtcacaggagaccatccaatcacagccaaagccattgctaagggggtgggcattatctcagaaggtaacgagaccgtggaagacattgctgcccgcctcaacattccagtgaaccaggtgaaccccagagatgccaaggcctgtgtagtacatggcagtgacttgaaggacatgacctctgaggagctggatgacattttgcggtaccacacggagattgtctttgctaggacctctcctcaacagaagctcatcattgtggagggctgccagcggcagggtgccatcgtggctgtcacaggggatggtgtcaatgactctccagctttgaaaaaggcagatattggggttgccatggggattgttggctcggatgtgtccaagcaagctgctgacatgattcttctggatgacaactttgcctccatcgtgactggagtagaagaaggtcgtctgatatttgataacttgaagaaatccattgcttacaccctaacaagtaacattccggaaatcacccccttcttgatatttattattgcaaacattccactgcccctgggcaccgtgaccatcctctgcattgacttgggcactgacatggttcccgccatctctctggcctatgaacaggctgaaagtgacatcatgaagaggcagcccagaaatcccaaaacggacaaacttgtgaacgagcgtctgatcagcatggcctatggacagatcggtatgatccaggccctgggaggcttcttcacttattttgtgattctggctgagaacggtttcctgccctttcacctgttgggcatccgagagacctgggatgaccgctggatcaatgatgtggaggacagctacgggcagcagtggacctacgagcagaggaagattgtggagttcacctgccacacggccttctttgtcagtatcgtggtagtgcagtgggctgacttggtcatctgcaagaccagaaggaattctgtcttccagcagggaatgaagaacaagatcttaatatttggcctctttgaagagacagctcttgctgctttcctgtcctactgccctgggatgggtgcagcccttaggatgtatcccctcaaacctacttggtggttctgtgccttcccctactcccttctcatcttcgtgtatgacgaggtgcggaagctcatcatcaggcgacgccctggcggctgggtggagaaggaaacctactactagcccactgccctgcacgccgtggaacattgtgccacacactgcacctacccctaccccccctttgtgtacttcaagtcttggagctcggaactctaccctggtaggaaagcaccaaagcatgtggggatccagacgtcctggaatgaagcatgtagctgtaatggggggcggggggagggctgcccgaaaaacaccgtggacggggacgacagcggggaaggtttatatgtgcctttttgtttttgtaaaaaaggaaaacctggaaagactgaaagattacgttttatatctggatttttacaaataaagatggctattataacggaa

SEQ ID NO: 458 - DNA, 1434 bp, Rattus norvegicus
cgggaacccactgcaaatggcctggtcaaccagaacaatgatgtcacttgctctgtacacctgtttcctctggctcctcaccagtggcctcaagactgtccaatccttgcatgattctcaccgaggcctagctcctactaatgttgactttgccttcaatatgtatcgtcacctatcgaccttggatcctcacaagaatatcttaatttcccctgtgagcgtctccatggccttggccatgatgtcccttgtcgccgtaggctccaaaaagaaccagtttttccaggatgtgggcttcaacctcacagagatcagtaaagaagagatctatcagagcttcgagaagctcagtcaccttctcagcaaggcagacagcagcttggagatgcgcatgggcaataccatgttccttgaccagagcctgaatatgagggactcattcttaacagacatcgaacactatcatgaatcagaggccttgactaccgatttcaaggacggggctgatgcccgtgagcatatcaacaggcatgtggagactaagacacagggagaaattacacatgtgttctcagaccaggatagtccagctcccctcaccctggtcaactacaatgtcctcaaaggcatgtgggagctccccataagcccagagaataccagggatgaggacttccatgtaagcgagaatagcacggtcagggtgcccatgatgttccagtcaggtgtcatcggttatcttcatgactcagagatcccctgccagttggtacagatgcagtatttgaaaaatgggactaccttcttcatccttccagacgagggccagatggacgctgtcaccgctgcacttcatagggacacagttgaaaggtgggacaagctgctgaccaaaaggctggtgaacctgtacatccccagagtctacatgtctggtacctacaacctcgaagatgtgctggagggcatgggcattacaggcttattcaccaaccaaacagatttcttagacatctcccaggatcctccacagaaagcatcaaagatagtccacaaggtcatgctgcaactggatgagaaagatgaaccgcctgttaccaccacagaggctcccccacagacaacatctgaaccgctcaccctcaccttcaacaaacccttcatcatcatgatgtttgacagcttcacttggagcagcctgttgttgggcaaaatcatgaatccagcttagtgcatgctggagaagctatggtaccgcctgactttggggggtagaagcctttccccagtcttctccaggttcttccgaacccaactaggtatccctacttttagatatcctgtaatgtataaccattgttgctactcccaagacaggtcaactgataaagtagcactgagatagagggaactgttattaaagggtgtttttgc

SEQ ID NO: 459 - DNA, 2386 bp, Rattus norvegicus
gggtcggggtgaggatgctgcggggcggctgcggaggcgtcgcttgctgctgaggcggctgggctctgcgcggcctcggcccgtgacagcgcgacgagcgcggcgcttccgatcggacgaatgcatgacaacatgtccacaatggtgtacatgaaggaagagaagctggagaagcttacgcaggatgaaatcatttctaagaccaagcaggtgatccaggggctggaggccctgaagaatgagcacaactccatcctgcagagtctgctggagacgctgaagtgcttgaagaaggacgatgagagcaacctggtggaggagaagtccagcatgatccgcaagtccttggagatgctggagctcggcctgagcgaggcgcaggtgatgatggccctgtctaatcacctgaatgccgtggagtccgagaagcagaagctccgagctcaggttcgacgtctgtgccaggagaaccagtggctgcgggatgaactggccaacacacagcagaagttacagaagagcgagcagtccgtggctcagctggaggaggagaagaagcacctggagttcatgaaccagctgaagaaatacgacgacgacatctctccctcggaagacaaagactctgattcttccaaagagccgttggatgacctcttcccgaatgatgaggatgacccaggacaaggaatccagcagcaacacagcagtgctgcggccgccgcccagcagggcggctacgagatccctgcccggctgcgcacgctccacaacctggtgatccagtatgcctcgcaggggcgttacgaggtggcggtgccactctgcaagcaggccctggaggacctggagaagacttccggccacgaccaccctgatgtggccaccatgctcaacatcctggccctggtgtacagggatcagaacaagtataaagacgcagcaaacctcctgaacgatgccctggctatccgtgagaaaaccctgggccgagatcaccctgcggtggctgcgaccctcaacaacctagcagtgctgtacggtaagcgtggcaagtacaaagaggccgagccgctgtgcaaacgggccctggagatcagggagaaggttctgggaaaggatcaccctgatgttgctaagcaactaaataatctggccttgctgtgccagaaccagggcaagtacgaggaggtggagtattactaccagagggccctggagatctaccagacgaagctcggacccgatgatcccaacgtggccaagacgaagaataacctggcttcctgttatctgaaacaagggaagttcaaacaagcagaaacattgtacaaggagattctcacccgcgcacatgaacgggagtttggatctgtggatgatgaaaacaagcccatatggatgcacgcggaggagagagaggagtgcaaaggaaagcagaaggacgggtcgtcttttggagagtatggcggctggtataaggcctgcaaagtggacagtcccaccgtcacaaccaccttgaaaaacctgggagcactttaccgccgccaggggaagtttgaagctgcggagacactggaggaagctgccctgaggtcacgtaagcagggtcttgacaatgttcacaaacagagagtggctgaagtgctaaatgaccctgagaacgtggagaagcggaggagccgggagagcctcaatgtggacgtggtcaagtacgagagtggccctgacggaggggaggaagtgagtatgagcgtagagtggaatgggatgagaaagatgaagctcgggctggttaaatgacttgctcagcgtccatggcctagccacccggtgcctcccctctgctcctgcatgacgggcagcgcctcctccggcccctccagtgctgtccgctgtctagcagccctaggagcttgtcagccgcacctctgggactggcccctcctttcggtgctgtcgtcctatggggtcttgatttctggatacatgtagctttgccagatatgtacttagaaatatcaaccgtgttaataagcccattaatgtgtaacacacaagtttaacagttaagagagagtagctgttcatcttgaggacaggcgttagtgtcacacaggtttattacagtggcatgatagtgacctgtgcagtcactgagctgtaggagtgaggcatgtgctgcacgtccctgtcgtacttagagacctggcagtgccctgctccgggcctccccaggacacactgacgtagatttgctgtgtagtcttggtgtggaaatttgaattctgcttttctctactaatctgaagtgctccgtgatgtgtgtatgtgtctttctaacttctaataaactcactccagctgaaaaaaaaaaaaaaaaaaa

SEQ ID NO: 460 - DNA, 3115 bp, Rattus norvegicus
gttgaacagcagccagagcctgaagaagccaactccagggcggaggaaaggaagcagaaggctcagcaccagtctccaacacttggcaagatgggtgactggagcttcctgggggagttcctggaggaggtccacaagcactctacggtcatcggcaaggtctggctcaccgtcctgttcattttccgcatgctggtcctcggcaccgctgctgagtcctcctggggagatgagcaggctgatttccggtgtgataccattcagcctggttgccaaaatgtctgctacgaccaagccttccccatctcccacattcgttactgggtactgcagatcatctttgtgtccacaccatctctggtgtacatgggccacgccatgcacactgtgcgcatgcaggaaaagcagaagctgcgggaggctgagaaagctaaagaggccggtggcaccggcacctatgagtacttggcggagaaagccgagctgtcctgctggaaagaggtgaacgggaagattgtcctccagggcaccctactcaacacctatgtctgcaccattctcatccgcaccgctatggaggtggccttcatggtgggccagtacctcctctatgggatcttcctggacaccctgcatgtctgccgcagaagtccctgtccccaccccgtcaactgttatgtctcgaggcccacagagaagaacgtcttcattgtctttatgatggctgtggctggactgtctctgtttctcagcctggctgaactctaccacctgggctggaagaagatccgacagcgcctggccaagtcacggcagggtgacaagcaccagcttcttggcccctccaccagcctggtccagggcctcactcctcctcctgacttcaaccagtgcctaaagaacagcccagatgagaaattcttcagtgacttcagtaataacatgggctcccggaagaatccagaccctctggccactgaggaagtgccaaaccaggagcagatcccggaggaaggtttcatccacacacagtatggccagaagcccgagcagcccagtggcgcctctgcaggccaccgctttcctcagggctaccacagtgacaagcgccgccttagtaaggccagcagcaaagcaaggtcagatgacctgtcagtgtgaccctcctcttagggaggaccagtcccagaaggaagccaaggagggtgaggcaggacagaagcggtctctctgactgtataccttcctcagcaccttctctcccgggtctggatggtgttgctcattaatcctccaaatttcagttctgagccgtattctcaaagattgggctactcctcaaatccccaaccccacatcctctaccagtattcgcagtgaagactttcaagtgatttagtgatatggtgggagcaggaatgggaaccttggcaaaatctggtctgggtaggacagacatgaagattcgacattagcaacagataaaccctcaccccaaatcttgtcttcttcggtactaggcccatcctttttattttttaaaggaagaatccaaggttgagagtattcatcaaataatctgcattgtattgttcctttgaatctgtcgtttccatgtgccatacctcagagtgctggtgaggtaactgtgggttgcccttggctgcatctccctcctcccagtcttaaaggggtgtccttggtcctcggccagcatcagctttacaagtgccttggtatgtgcctttggaaaacactgcatgttgatgatgctgcagccttactgccaggctagacacccagctcagaagggtgccaagacctctagaagtcactgtgcacataagcattgctggaattgccaccagctgtcatcctgcagtcctttacagttcaacctagtgatagaaaccgtcctggacagctcacccagtgttcctctaaaatcttggttaacaggaatgtccaaagtcaccatcctctcttggaccctggccagattaccagccaccaagttcagtggaatttccccaggatttaatgaaacaaagagagcattgtgcttctcaggttccttggggggtgttgggggggattcttctgtggagatgaaaagagaggagggggaggacactggaaaactattttcccttctgcatatgccttccactgcctcccagcttggactgctgagaggtgtggtgatagatagcaacggaggcccaagatctctctcttagaggcatcaaggggacctggaagccgagatggagctccggttggttttgacacggcccttatttagtgcagatgctcctgtgtttccttgggacccttaggtacatcagggagggactgtagaaaattcctgccttcctcagggtctatcctgggctatctactgagaggatccacagtcggtgtctctccttatgcagatggaaagatgctcagcgtcagatatcaagacttacaaacacaatgctctgtgtgtgtgtgtgtgtgtgcatgtgtgtgtatgagtgtgtgcatactcaaccatctatgtgtgtatatgtgtgtgtgtgcatgctcaaccatctgtgtgtgtgtgtgtgtgtgtgtgtgtgtgtgtgtgtgtgtgtatacccgtgtatgcatgcagatagaatggtaaagaagagccctgaagaactgtaaggaaacatgtagaaaacttgggtttttctgcctccttttctgttgcccgacaggacagctgagcttgcttcctaatcagcctaaaggtcaaacctgggaagtcagtacaggagggtgaaggttcagaggtcaacccctgcccatgtgaccatctctgggtccctctgctggtatttggatggctgaagatacttgggaaaggctgactggctgtcccagccccagtgtatctcattcattcctgacaccgacgctatgattctctgcttttctagttatgggatgtgtgtttgtcttctgaaatggggccttttgagttagaaaatctgagaccagtcttcgatggtgaggtttttcagaagagaaagagaaagtaatatgtgtgactggttttaaataaaatacgtctctacatgttaaaaaaaaaaaaaaaaaa

SEQ ID NO: 461 - DNA, 812 bp, Rattus norvegicus
ctcagttccagagcctgtgtaccgttccaggttacggagtttctgcacagtttgcaaactggaacttggcagaatggctgagatctgcaaaatgaaatacacggtgttggacagccctttggggaagatagagctgtccggctgtgagcgaggcctgcatgggatacgatttctcagtgggaagaccccaaacactgaccccacagaggctccagcctgtcctgaggtgctcggtgggccagagggagtgccagagcccctggtgcagtgcacagcctggctggaagcctatttccacgaacctgcagccacagaggggcttcccttgcctgctctccatcaccctgtgttccagcaagattcattcaccagacaggtgttatggaagctgctgaaggttgtgaaattcggagaaatggtttcttaccagcaattagcagccctggcaggcaaccccaaagcggctcgtgcagtaggaggagcgatgaggagcaatccagtccccatcctcatcccctgccacagggtgattcgcagtgacggtgccattggcaattactctggaggaggacagactgtgaaagagtggcttctggcccatgagggcatcccaactggacagccggcctccaaaggcttgggtctgattgggagctggctcaagccatccttcgagtcttccagcccaaagccgtctggctgaaattgagtaaccgtttgaatgacacatagatgtaatgcggtgttggaagcggatgtgtggtgggtaccactatattaaaagagctgcatgtgtcctgggaaaaaaaaaa

SEQ ID NO: 462 - DNA, 3679 bp, Rattus norvegicus
tgacatggtaaagagtctggccacagataaaggaccgaaatgactgactcaaaatacttcacaacaaccaagaaaggggagatcttcgagttgaaggcagagcttaacagtgacaagaaggagaagaagaaggaggcagtaaagaaagtgattgcatcaatgaccgtgggcaaagatgtcagtgctctcttccctgatgtggtgaactgcatgcagacagacaacctggagctaaagaagctggtgtacctgtacttgatgaactatgccaagagtcagcctgacatggccattatggctgtcaacaccttcgtgaaggactgtgaggaccccaacccccttatccgggccctggctgtgaggactatgggctgcatccgagttgacaagatcacagagtacttgtgtgaaccactccggaaatgcctgaaggatgaagacccatatgtgcgcaagacagcagctgtgtgtgtagccaagctccacgacatcaacgcccagctggtagaggaccagggtttcctggacacactcaaagacctcatctctgactctaaccccatggtggtagcaaatcgagtggctgccctgtcagagatcgctgagtctcaccccagtagcaacctgcttgacttgaaggcacagtctatcaacaagctgctgacggcccttaatgagtgcaccgagtgggcccagatcttcattctggactgtctgggcaactacatgcccaaggatgaccgtgaggcccagagcatctgcgagcgggtcactcctaggctttcccatgccaactctgctgtggtgctgtccgcagtgaaggtcctgatgaagttcatggagatgctgtctaaggacctggactactatgccacactactcaagaagctggcccctcccctggtcaccctgctgtcagcagagccagagccgcagtatgtgcctctgcgcaatattaacctcattgtacagaaaaggccagagattttgaagcatgaaatgaaggttttctttgtgaagtacaatgaccccatctatgtgaagctggagaaactggacattatgatccgcctggcctcccaggccaacattgcccaggttttggcagaactcaaagagtacgcgacagaagtagatgtggattttgtacggaaggcagtgcgtgccattggccgctgtgccatcaaggtggagcaatctgcagagcgctgtgtgagcacattgcttgatctcatccagaccaaggtcaactatgtggtccaggaagccattgtggtcattaaagacatcttccgcaagtaccccaacaagtacgagagtgtgatagccacactgtgtgagaatctggactcgctggatgagcctgaggctcgcgctgctatgatctggatagtgggcgagtatgctgagcggattgacaatgcggacgagctgcttgagagcttcctcgacggcttccatgacgagagcacccaggtccagctacagctgctgacagccattgtgaagctcttcctgaagaagccaacagagacgcaggagctggtgcagcaggtcctcagtttggccactcaggactcggacaatccagaccttcgggaccgtggctacatctactggcgcctgctctccacggaccctgtagctgccaaagaggtggtactggctgagaagcccctcatctcagaagagacagaccttattgagcccacactgctggatgaactcatctgctacattggcacactggcctctgtctaccacaagccacccaatgcctttgtggagggcggccggggagtggtgcacaagagtctgccacctcgcactgcctcgagcgaaagcacagagagccctgaggcagcccctgccggagcacctgctagtgaccagcctgatgtcattcctgcccagggtgacctgttaggtgacctcctcaacctggaccttgggcccccagtgagtggcccacccttggctgcctcctcagtgcagatgggagctgtggatcttcttggtggtggcctcgacagcctgatgggggatgagcctgaagggattggagacagcaactttggggcacctccagcatcagtggcggcggcagcaccagccagacttggagcacccgtcagcagtggcttaagtgacctctttgacctgaccagtggagtgggcaccctctcagggtcctatgtcgctcccaaagcagtttggctccctgccatgaaggccaaggggctggaaatctctggcaccttcacccggcaggttggctccatctccatggatctgcagctgactaacaaggccctgcaggtcatgacagatttcgctatccagtttaatcggaacagctttggcttggcccccgctgcgccactccaagtgcacgccccactgagccccaaccagacggtggagatctccctgcctcttaacacggtgggctcagtcatgaagatggagcctctgaacaatcttcaggtggctgtgaagaacaacattgacgtcttctacttcagcactttgtacccactgcatgtcctcttcgtggaggacgggaagatggaccggcagatgttcctggccacatggaaggacattcccaacgagaatgaagcccagttccagatcagagactgcccgctgaacacagaggctgcaagcagcaagctgcaaagcagtaacattttcactgtcgccaagaggactgtggagggccaggacatgctctaccaatctctgaagttgaccaatggcatctgggtgctggcagagctgcggatccagccaggcaaccccagtttcacgctgtccctgaagtgtcgagccccagaggtgtcccagcatgatatccaggcctacgagaccatcctcaagaactgaagtccctctcgctccaccccagccttctccttctgccagcccagccatggaaccctgtggtggcagcacctcctcctttctttggggagaagccagtgggctcctgacccacccaggaggcctcccctgatcctaactgagggcctggagcagggccaggtctcctagagtgaaatctccgtgcatctccagtggctgcttttttctattgctgttgatgtgggatcaaaggaagtggatccagcacagcatcagaagctggacgggggccacagggtgctcttccttccttctgctctcctggggtgaacatggaaccctcctggggtcccagcccataatccctgccctgtctcctcagtgagcctgtctgggtagagtcctctgggtgccaatattactgtttgggactctgagagctggaggtggtgatggacagacatgagcccaggggagcaacctgggctggcactgtctgccccatataacaccagttggtgctctgtgaccacctgcatggcccagagcccgatctaggattctgttcccttaggccctggaggatggtcactgcctaccaaacattcctcggtgtcctctctgtgagtccagggctctcagaccagaagtggggtgaaaggtggggcaaggggcagtgggaccgcttctagtgtgagctcctgacccactggctgccctggctccccagtctgtgtgtgacagtgacaggttgatcgtcgctactgtttgataataaagagttctgcttttggcaaaaaaaaaaaaaaaa

SEQ ID NO: 463 - DNA, 4008 bp, Rattus norvegicus
cccgggcagcgcgctctgcggtcgcctaccgcctgccgcccccgcgccgccgcgacgtggcaggaggcgatgcggcggcgccgctacctgcgggaccgcgccgaggcggcggcggcagcggcggcgggaggcggagaggggctgcagcggtcccgggactggctctacgagtcctactactgcatgagccagcagcacccgctcatcgtcttcctgctgctcatcgtcatgggcgcctgcctcgccctgctagccgtcttcttcgcgctcgggctggaggtggaagaccatgtggcatttttaataacggttcccactgccctggccattttctttgccatattcattcttgtctgcatagagtctgtgttcaagaagctactccgtgtgttttcgctggtgatttggatatgtctggttgccatgggatacctgttcatgtgcttcggagggactgtgtctgcctgggaccaggtgtcattcttcctcttcatcatctttgtggtatataccatgcttcccttcaacatgcgagatgccatcattgccagcatcctcacatcttcatctcatacgatagtgctgagcgtctacctgtctgcaacaccaggggccaaggagcacctgttctggcagatactggccaatgtgatcattttcatttgtgggaacttggcgggagcctaccacaagcacctcatggagcttgccttgcagcaaacctatcgggacacgtgtaattgcatcaagtcccggatcaagctggaatttgaaaaacggcagcaggaacggctcctgctctccttgctgccagctcacatcgccatggagatgaaagctgaaatcattcagaggctgcagggccccaaagcaggacagatggaaaacacaaacaacttccacaatctgtatgtcaaacgacacaccaacgtgagcatattatacgctgacattgttggcttcacccgccttgcaagcgattgctcccctggcgaactggtccacatgctgaatgaactctttgggaagtttgatcaaatagcaaaggagaatgaatgcatgagaattaaaattttaggagactgctattactgtgtttccgggctccctatatcactccctaaccatgccaagaactgtgtgaaaatgggattggatatgtgcgaagccataaagaaagtgagggatgctaccggagttgatatcaacatgcgtgtaggagtgcattctgggaacgttctctgtggtgtgattggtctccagaagtggcagtatgatgtgtggtctcatgatgttactctggcaaaccacatggaagctggaggagtccctgggcgtgttcacatttcttcagtcactctggagcacttgaatggggcttataaagtggaggaaggagatggtgagataagagacccatatttaaagcagcacttggtgaaaacctactttgtaatcaatcccaagggagagcgacggagtcctcagcatctcttcagacctcgacacactctggacggagccaagatgagagcatctgtccgcatgacccggtacttggagtcctggggagcagccaagccattcgcacatctgcaccacagagatagcatgaccacagagaatgggaagattagtaccacggatgtgccaatgggtcaacataattttcaaaatcgcaccttaagaactaagtcacagaagaagagatttgaagaagaactgaatgaaaggatgatccaagcaattgatgggatcaatgcacagaagcaatggctcaagtcagaagacattcaaagaatctccctgcttttctataacaagaatatagagaaagaataccgagctactgcactgccagcattcaagtactacgtgacctgtgcctgcctcatctttctctgcatcttcattgtacagatacttgtattgccaaaaacgtccatccttggcttctcctttggagctgcatttctctccctcatcttcatcctctttgtctgcttcgctggacagcttttgcaatgcagcaaaaaggcctccacctctctcatgtggcttttgaaatcatcaggcatcatcgccaaccgcccatggccacggatctccctcacaatcgtcaccacggctatcatactaaccatggctgtgttcaacatgtttttcctgagcaactctgaggagacaacccttcccactgccaatacatcaaatgcaaacgtttctgtcccggataaccaggcgtcgattcttcatgctcgaaacttgtttttcctcccgtacttcatatacagctgcatcctgggcttgatctcctgctccgttttcctgagggtgaactatgagttaaaaatgttaatcatgatggtggcactcgtgggctacaacaccattctactccacacccatgcccatgttctggatgcgtacagccaggtcctgtttcagagaccaggcatttggaaagacctgaagaccatgggctccgtgtcactctccatattcttcatcacgctgctggttctgggcagacagagtgaatattactgtaggttagacttcttgtggaagaacaagttcaaaaaagagcgggaggagatagaaaccatggagaacctaaatcgagtgctgctggagaacgtgcttcctgcacacgtggctgaacacttcctggccaggagcctgaaaaatgaggagctgtaccaccagtcctacgactgtgtctgtgtcatgtttgcctccattccggacttcaaggagttctacacagagtcagatgtgaacaaggaaggcttggaatgcctgcggctcctgaatgagatcattgctgactttgatgatctgctttctaagccaaagttcagtggtgttgaaaagatcaagaccattgggagcacatacatggcagccacgggactgagtgccatacccagccaggagcacgcccaggaacctgagcgtcagtacatgcacataggcaccatggtggagtttgcatatgccctggtgggaaaactggatgccatcaataagcactccttcaacgacttcaaactgcgagtgggtatcaaccatgggcctgtaatagctggcgtcataggggctcaaaagccacagtatgacatctggggcaacactgtcaacgtggccagcagaatggacagcaccggggtcctggacaaaatacaggtgactgaggagacaagcctcatcttgcagacgcttggctacacgtgtacatgtcgaggtatcatcaatgtgaaggggaaaggggacctgaagacatattttgtaaacacagagatgtcaaggtccctttctcagagcaacttggcatcctgagaagctgtctcttcctgacaagaagaatgtacttgcaggaaggtaccacgcactttctgactgcaacccttccccttcgtcctgatgtacgtgctctgccccatcctctggagcccctgcagactagttcctgtgacccagtgacatactgtttggtgtctgcgcgtgcccaggttgtcctgccacttgcactgtgcttgctcctaagcaggaggggaaggaaccatgtcctggaaggagagcattggaagaagtgatgaagaggtgaagtgaacacacattcttaaggcaataaaaccggggggtgtatattatcttctggtgcatgttcttctctggaaaatacggtagctcgtaactgcatccctagtctgatattcaaacacacagtatttgtgaataagctgatcccgtcacccaacatggagtctgtgttcacctacccatgtgtctcattgccagtggtcgtccttgggggctcagctgagactctcagcttctgtcaccttgctgtcctgtcttgtggcagcagcacgttgccatccatcaccagaattagtcctcacagcctaggaccagttttgtaccaaactcatctgatgttttgatgccatttgtcaaaagtaaggttaattcattaaaagttttatgtactttgaaaaaaaa

SEQ ID NO: 464 - DNA, 3931 bp, Rattus norvegicus
cctggcagtgagagacagtggggagaggagaaagcgggctgctgtccttccaggccactttcgctgcgcgattccgcgagctcccggcaggaggtgaaagtccccggcggggtccggatggcgcagttgcactgcggctgctgagctcgcggccgcctgcgcgcgctgggcgcggggactcgcttcggctagtaactcctccacctcgcggcggacgaccggtcctggacacgctgcctgcgaggcaagttgaacagtgcagagaaggatcttaaagctacacccgacttgccacgattgccttcaatctgaagaaccaaaggctgttggagagatggcagtgacatcccaccacatgatcccggtgatggttgtcctgatgagcgcctgcctggccaccgccggtccagagcccagcacccggtgtgaactgtcaccaatcaacgcctctcacccagtccaggccttgatggagagcttcaccgttctgtctggctgtgccagcagaggcaccaccgggctgccaagggaggtccatgtcctaaacctccgaagtacagatcagggaccaggccagcggcagagagaggttaccctgcacctgaaccccattgcctcggtgcacactcaccacaaacctatcgtgttcctgctcaactccccccagcccctggtgtggcatctgaagacggagagactggccgctggtgtccccagactcttcctggtttcagagggttctgtggtccagtttccatcaggaaacttctccttgacagcagaaacagaggaaaggaatttccctcaagaaaatgaacatctgctgcgctgggcccaaaaggaatatggagcagtgacttcgttcaccgaactcaagatagcaagaaacatctatattaaagtgggagaagatcaagtgtttcctcctacgtgtaacatagggaagaatttcctctcactcaattaccttgccgagtaccttcaacccaaagccgccgaaggttgtgtcctgcccagtcaaccccatgaaaaggaagtacacatcatcgagttaattacccccagctcgaacccttacagcgctttccaggtggatataatagttgacatacgacctgctcaagaggatcccgaggtggtcaaaaaccttgtcctgatcttgaagtgcaaaaagtctgtcaactgggtgatcaagtcttttgacgtcaagggaaacttgaaagtcattgctcccaacagtatcggctttggaaaagagagtgaacgatccatgacaatgaccaaattggtaagagatgacatcccttccacccaagagaatctgatgaagtgggcactggacaatggctacaggccagtgacgtcatacacaatggctcccgtggctaatagatttcatcttcggcttgagaacaacgaggagatgagagatgaggaagtccacaccattcctcctgagcttcgtatcctgctggaccctgaccacccgcccgccctggacaacccactcttcccaggagagggaagcccaaatggtggtctcccctttccattcccggatatccccaggagaggctggaaggagggcgaagataggatcccccggccaaagcagcccatcgttcccagtgttcaactgcttcctgaccaccgagaaccagaagaagtgcaagggggcgtggacatcgccctgtcagtcaaatgtgaccatgaaaagatggtcgtggctgtagacaaagactctttccagaccaatggctactcagggatggagctcaccctgttggatccttcgtgtaaagccaaaatgaatggtactcactttgttctcgagtctcccctgaatggctgtggtactcgacatcggaggtcgaccccggatggtgtggtttactataactctattgtggtgcaggctccgtcccctggggatagcagtggctggcctgatggctatgaagacttggagtcaggcgataatggatttcctggagacggggatgaaggagaaactgcccccctgagccgagctggagtggtggtgtttaactgcagcttgcggcagctgaggaatcccagtggcttccagggccagctcgatggaaatgctaccttcaacatggagctgtataacacagacctctttctggtgccctccccaggggtcttctctgtggcagagaacgagcatgtttatgttgaggtgtctgtcaccaaggctgaccaagatctgggattcgccatccaaacctgctttctctctccatactccaacccagacagaatgtctgattacaccatcatcgagaacatctgtccgaaagacgactctgtgaagttctacagctccaagagagtgcactttcccatcccgcatgctgaggtggacaagaagcgcttcagcttcctgttcaagtctgtgttcaacacctccctgctcttcctgcactgcgagttgactctgtgctccaggaagaagggctccctgaagctgccgaggtgtgtgactcctgacgacgcctgcacttctctcgatgccaccatgatctggaccatgatgcagaataagaagacattcaccaagcccctggctgtggtcctccaggtagactataaagaaaatgttcccagcactaaggattccagtccaattcctcctcctcctccacagattttccatggcctggacacgctcaccgtgatgggcattgcatttgcagcatttgtgatcggagcgctcctgacgggggccttgtggtacatctactcccacacaggggagacagcacgaaggcagcaagtccctacctcgccgccagcctcggagaacagcagcgcggcccacagcatcggcagcactcagagtaccccctgctctagcagcagcacagcctaggtggacagacagacgcccgcccaccgcagccagggcagggcccgatgccagtgctgcgtgtccacagtcagaagtcttgatctgggctccctgtaaagaaagagtgaatttcagtatacagacagccagttctacccaccccttaccacggcccacataaatgtgaccctgggcatctgtcacacgaaagctaagctggtggccttccccaccagcccctcgcaggatgggggtttcaatgtgaaacatatgccagttttgttttgtttttttaatgctgctttgtccaggtgtccaaacatccatcatttggggtggtctgttttacagagtaaaggaggcggtgaagggacgtcagctagtgtgtagagccaaggggagacagctaggattctcgcctagctgaaccaaggtgtaaaatagaagacacgctccatatccagtctcgccctggatgcccccttctgacctgccacaccctacatggtcccctgtgtagcttgctagcctttgtggggaggggctgtcacttaccaccgcaacattcctctcttgggccaatgaacgctaattcctggtcctccatgcacgcacaccaactccaaaagtgccttagtcaagagcatttctcctttcaggcacacagaaactgaaaacggtcgagagagtgggatatcggatttgtgcctgtctccggcattccgtcctaacaatatttaaatatcaggctggtagggttcggtggtcagcgaggggattagcagggtgatgcctgtgtgtggccatatgggcacaaatgcagaacacattgtggggacgatcacttcccccttaaatatggtctatccttccagagttggaacttaagttatatgtggtaggctatattgactccaaattcatcagcctctctgatgggcctgtataaaaacctggagaggcccaggccatctgatgatgtcacctgtcctgccccgaggatgcagagactgggagaagggcgctgactttaaaaagggtttcaggtgaacttct

SEQ ID NO: 465 - DNA, 485 bp, Rattus norvegicus
gaattcatttctctactgaaaccttaaagtagtatttggtcattcattgtatgtgtcttatatacccacccacacacagacacaaaggaaatctatcaaattaatcctgatgtattcgaagtggttattcaattcatttatggcagagcaatatcagtcctaatgactcgtgaaagtgttactaactgaatcattatcttacatttactgtttagtaagcatattttgaaaaatgtatggctagagtgtcataataaaatggtatatctttctttagtaattacattaaaattaatcatgtttgattaactggttcctctgatgtagtgtgtcatttcttaacatatagagaactgtagagcatttttttatttaatggcagtgtttgcaactcacaggcacagaaacactcagactaatcatttatcatagagatatagaacttacaggttaaagtattcacaatgtatgtaagagagttatga

SEQ ID NO: 466 - DNA, 2974 bp, Rattus norvegicus
gtttccggggcgctgtgcgaaagctagagcaggcgccagagaagacagctcgagctcagaacccgagaccaagcctctctcccggaggcagctcagctcctatcttctctaggcccgctgcagcgtgcgctgggcttcgttttatgcgggtacgagccacgtccccggggaatatgcagcgtgcgtggatcctgctcaccttgggcttgatggcctgtgtgtcggcagagacgagagcagagctgacatctgataaggacatgtaccttgacagcagctccattgaggaagcttcaggattatatcctattgatgatgatgactattcttctgcctctggctcaggagcttatgaagacaaagggagtccagatctgacaacatcccaactgattccaaggatctccctcactagtgctgctcccgaagtggaaaccatgacgttgaagacacaaagcatcacacccactcagaccgagtcacccgaagaaactgacaagaaggagtttgaaatctctgaggcagaagaaaagcaggaccctgctgtaaaaagcacagacgtgtacaccgagaaacattcagacaatctgttcaagcggacggaagttctagcagctgtcattgctggcggtgtgattggctttctctttgccattttcctcatcctgttgttggtgtaccgcatgcggaagaaagacgaaggaagctacgaccttggagaacgcaaaccgtccagcgcagcttaccagaaggcacccactaaggagttttatgcataaaactcccacttagtgtctctatttaagagatcactgaacttttcaaaataaagctttagcatagaataatgaatatctttgttatctgttttgttcattacagagccatgctggccctttaatgatgaagatcccattgtatttaaaatttttcatatatttctttagaatgacttaaaagtaaaaatttaacatctgcagtgttctgtgaatagcagtggcaaaatattttgttacaaaaacccttgacattcatggaattgatttgaacatctatgtgcaaatacaaaatgattgtgtttgtcctctggttcaaagatgactgctgttcccctcatcagcagatctccagttgaccttaccgagttgatctttgttaatttatctcttgttcctcttctctgccctcccttcttgtctcctcccttaaaaacaaaaccttatgccttttgtagctgtcatggtgcaatttgtctttgaatgattacaataatggtaatttagtgtatatgtgatttttttcaattatgtaaactttaacctcctctttatgtaatttttttaaatgtcagactacccattttacacttgctttaatttccattccctgtagcttcaggcagatttgcaaaggcaaattataaaattggattattactacgaaactgttagtcctagttatctaagcagatcttctcttggaggatttgacatcactgacaagcctcagcaaacccaaagatgctaacagtatttgagaagttgctacagactcctttggccactgtacttgctagtttacaatttgaaggtacaaggaagagtttaaaggaaaaaaaagatcagtttttgttcttaaaaatgcatttaagttgtaaacatctttttaagcctttgaagtgcctatgattctatgtaacttgttgcagactggtgttaatgagtatatataacagtttttaaaaagttggtattttataagcacagacaattctaatggtaacttttgtagtcttatgaatagacataaattgtaatttgggaacaagcaaactactgaataaatcacatggcctaatattgaaaatgtcactgttataaattttgtacatttcttatcaaatgtacagcttccctttgctatgactgactgtctgttctcagtgactatgtgggtttgatttccgagtatccatggtgtctgtaagaccaaagagcccctcagttaggctgtttattacaagatttacctctggattggccagaggaaatgtatgcgttatcctgcatgtgtctgggtgcagggatagaatgactgccaggggatttcaaggtttgcaaactgtgtagtgtagctattgacaatattgagacagatgccttcttttgcaatttactcttaaaaagtataaattccaaagaagcaaagggacctttctagaagtagataactggggatcagccctatagaattgcttaactgtcaaagctcccttgcagaagaaccctgtgagtgacaaccacagccactccatgggcctggagggaagggtgtggaggctctgcatgttaaaacgacaacctggctgcttaggatggatgtttctagaaaaagtaatgccagaggaggagatggagggatggggtaccccggttgggtactcactgaacagagcatttcccttttctgttctattttctattttcccattaatttttagttttaaactgtgagccatggaagtagaaagaagacagcaagaactgcaacttttccagcatacagtcaactttcgataaaagtttgactactttgagcaccttccctgggcttgtcacagaactcattcaaacaaaactaaagtaacacttggaacagtgttgtgtctgaatccttaatggccttaatttctgtccaattatagccgtaattcaccttatttagaattaagaggaaatgatgggcccttccaaagctgcacaatgccctcaatcacggaggctgagaatgtagtggttatacctctaactgtgcaaaacagtgaaaccctaattgtagaatgacttgcttggaatatctatgccagggaaaaaatactggcaaatattttgtcactgctgtaaagcaaatttgtttaagtgccaaaataaagtctgtcgtgccgaaagtaaaaaaaaaaaaaaaaaaaaaaaaa

SEQ ID NO: 467 - DNA, 1563 bp, Rattus norvegicus
gaattccggggggaggctggccgggacgggatgggcgacacggggcgggattcccgaagcccagacagctcctccccaaatcccctttcccaggggatccctccctcttctcctcctggcccacctcacaccccttcagcacctccacctccaatgccacccccgccactgggctcccccttcccagtcatcagttcttccatggggtctcctggtctgccccctccggctcccccaggattctccgggcctgtcagcagccctcagattaactccacagtgtcgctccctgggggtgggtctggcccccctgaagatgtgaagccaccagtcttaggggtccggggcctgcactgtccaccccctccaggtggccctggggctggcaaacgactttgtgcaatctgcggggaccgaagctcaggcaagcactatggggtttacagctgcgagggctgcaagggtttcttcaagcgcaccattcggaaggacctgacctactcatgccgagataacaaagactgcacagtggacaagcgccagcggaatcgctgtcagtactgtcgatatcagaagtgcctggccaccggcatgaaaagggaggcggtacaggaggagcgacaacgggggaaggacaaagacggggatggggatggggctgggggagcccctgaggagatgccggtggacaggatcctggaggcagagcttgctgtggaacagaagagcgaccaaggcgttgagggtcccggggccaccgggggtggtggcagcagcccaaatgacccagtgactaacatctgccaggcagctgacaagcagctgttcacactcgtggagtgggcaaagaggatcccgcacttttcctccctacctctggacgaccaggtcatactgctgcgggcaggctggaatgagctcctcattgcgtccttctcccatcggtccatcgatgtccgagatggcatcctcctggccacgggtcttcatgtgcacagaaactcagcccattctgcaggcgtgggagccatctttgatcgggtgctgacagagctagtgtccaaaatgcgtgacatgaggatggacaagacggagcttggctgcctgcgggcaatcatactgtttaacccagacgccaaggggctctccaaccctggagaggtggagatccttcgggagaaggtgtatgcctcactggagacctactgcaagcagaagtatcctgagcagcagggccggtttgccaagctgctactacgtcttcctgccctccgctccatcggcctcaagtgtctggagcacctgttcttcttcaagctcattggcgacacccccattgacaccttcctcatggagatgcttgaggctccccaccagctagcctgagtccggatgcacacggagggagagtgtcgctgaggaggacttgagccgcgcgggggcgagaaccatggacaggtgcagagcaggaggggacttgcccatcctgccaggggtctggcaacacttaacagggtttgcgtggtccccaagtcagagcagagggaccccagatccctgtga

SEQ ID NO: 468 - DNA, 5282 bp, Rattus norvegicus
aagctttttgtgcaatcccacctcctctagctaggcttggttagagtctgcctagccgtggccccgcccactccatcagtccaatcagctcgtgttctccctccacctgcccaatcactccctccccatccattcatcgcctcctcctgcccaatcacatctgcttctctaccaaggctccgccccaacaccctgcccccctcagccccgcctccctgtccaatgctcagctcagtgtgcgtctggtcgttcagcgggcgccaggggacccgcaagcagcattctcagccggcgccaacgccgcagccgcctgagtcctcaccgccgcctctgctaccgccgccgcagcagcagtgcgctcagcccggcaccgccgcctccccggcgggtgccccgctttcctgtgggcctgggggccggcgcgccgagccatgctccgggctgccggcggtggccatggggcggcacggcggcggcggcggcgacagcggtaagatcgtgatcaacgtgggcggcgtgcgccatgagacgtaccgctccacgttgcgcaccctaccggggacccggctggccgggctgaccgagcccgaggcggccgcgcgctttgactacgacccgggcacggacgagttcttctttgaccgtcacccgggcgtcttcgcctacgtgctcaactactaccgcaccggcaagctgcactgcccggccgacgtgtgcgggccgctcttcgaggaggagctgggcttctggggcatagacgagacggacgtggaggcctgctgctggatgacctaccgccagcaccgtgatgccgaagaggcactggactccttcgaggctccggactcctcgggcaacgccaacgccaacgccggaggcgcccatgatgcgggcctggacgacgaggcgggcgcaggaggtggcggcctggacggggcaggcggcgagctcaagcgtctgtgttttcaggacgcgggcggaggtgccggaggacctgccggaggcccgggcggcgcgggcggcacgtggtggaggcgctggcagccccgcgtgtgggcgctttttgaggacccctactcgtcgcgggccgccaggtacgtggccttcgcctccctattctttatcctcatctccatcaccaccttctgcctggagacacacgagggcttcatccacatcagcaacaagacggtgacgcaggcctctccaatccctggggctcccccggagaatatcaccaatgtggaggtggagacggaaccctttttgacctacgtggaaggcgtgtgtgtggtctggttcacctttgagtttctcatgcgggtcaccttctgcccggataaggtggagtttctcaaaagcagtcttaacatcatcgactgtgtagccatcttgcccttctacttggaagtgggcctgtcaggtctcagctccaaagctgccaaggacgtgctgggcttcctgcgcgtcgtccgcttcgtgcgcatcctccgtatcttcaagctgacccgccattttgtgggcctgcgggtcctgggccacacgctccgtgccagcaccaacgagttcttgttactcattattttcctggctctgggggtcctcatctttgccaccatgatctactatgccgagcgcatcggggccgatcctgatgacatcctgggctccaaccacacctacttcaagaacatccccatcggcttctggtgggctgtggtcaccatgaccacactgggctatggtgacatgtaccccaagacatggtctgggatgctggtcggggcactgtgtgccctggctggtgtgctgaccattgccatgccggtgcccgtcattgtcaacaacttcggcatgtactattcactggctatggccaagcagaaattgccaaagaagaaaaacaaacatatccccaggcccccgcagcctggctcacccaactactgcaagcccgatcccccgcctccgcccccaccacacccccaccacggcagcggtggcatcagcccaccaccgcccatcacccctccttccatgggggtgactgtggctggggcttacccacctggaccccacacgcaccccgggctgcttaggggtggtgctgggggactgggaattatgggattgcctcctctgccagcccctggtgagccctgcccactggctcaagaagaggtgattgaaaccaacagggcagacccccgtcccaatggagaccctgcagcagctgcactggctcatgaggactgccccgccattgaccagccagccatgtctccagaagacaagagcccgatcactcccggaagccggggtcgctacagccgggaccgagcttgcttccttgtcacagactatgccccttcccccgatggctccatccgaaaaggttacgagaagtcccgcagcctgagcagcattgtgggcctgagcggggtgtccctgcgcctcgcgcccctcgccaccccccctggctctccccgggccacgcgccgagctcccccgaccctgccctccatcctctagcgctgtcctcccccctgtggggggactgggggtgatgggaaggtgaaaaggagctgggagaaggggtggggaaagggttatttaaaaaaaaaagttaataatatgcaaaagatgatgccagcagacacccccggggcctctcactccccatatagtagagaaccaaatagaaggggggcggggccggagcctgtacccccacaactccctcccctttccccccccaaaaaatgcaaacctcaggtctccatgagccataggacacccctcccatcgactcctgtaaataactaaaagccgattccatcttggggcacccactccagtttgcatgcctctccgacccccctcttcagcaataagccgccaggagctgcgtgcagagagttggaggggaggctgctgggagcctctggggtcggggctagcattttaggggtcttcctggataccccgccaaaaggcaacccacccaccactaattgattcaggaaaaacaaaaacctctaggaacacgtaggaaaaggaagacaggttaatcagctgcaaccccgaggagctcagcgtgggggtgggggtggggttctgccagctgctcttgggcttggaggacgccagctggtgcattccacccacgcccgcctccagagatctgctccctctattcgctgcatggacttggccctccaggcccagaaccctctctacccattgcagtctccactctatcccaatgtgagactagtaccctagacttacggagatagaacctggcaccctgcactcccataccccacggactccggcgccccacacttcccacctccatcactccatcccccactggcctggactgcaccacagagttcttccaccctttccttgcaccccagctcacttccagccattggggttctgacagtcctcaagaccctgacatatctagacacccccatatcctcaagcctcccccaaccccagacagccccaaccctctgatatcacatttctctgtcctgggcgcctctgacgcaagaccttccgggacaagctctgattccagggagctcccaccccattccagcatcgctgtctaggcagccccctcctctacgcttcccccccccccatggtgccaaaacacattttcttcatggccaccagagtttcccagagcgtgggactcccgttccctcttcgcatgctgaactttgcagagtgcacagacgaccaagtgttttaaaattgtgtactcttcgcaagctcatacccggctggtgcgtcctggcagcgtagcagttgggcgttgccattgaaagcaagtcaaggacaggatgggacccaatgctaaaagcgctggcttaatgtgctaaggtcccagggttcaatctccagcaatccctctttgcccgaccggtgggaaaagaggacacgcccacctcggctaggatcttagcctgcccttcccagcttccttgcccaccgcgtgccacattcgcgggtggaaaactttctcaaatctcgtcttggctccaggatgctacctcccctaagcccagagaccacactggtcccagaatccttagtgaacttccccttttggagctgggtggtcggcagaattagcaatcccttgttcccaccgcctcagggaaacctcccgctgtcaccagagttgtcggtgggggtgtccttgggcccaattcttgatgcaacaattcctatgcaagggacattttgagtccctcccgcactccccgccttccctcgggaccttaaaccctggtgagacaggggttgaggagtggggtgggatctggtaggggcagggcaaagggctaggggactctagacaccagggtatggggtgaggactcctaatattgccaaaggattcaacttatttaaacaacccctattaccccccccccccgtccctcaaaagagcgaatggggcggggaaaggggtaagagtcctttttgaagggtaccaaccacttcccactgtttcaccctgtgctctccagtcccctacacatatccagctttttagttaagcatttttaaaaagctacagttcattataaacgtctacaaaacgtgatttttgcccctccacatttcccaatttaccaaacagtgtgggattcggggagggagagccagtcctggtctcccttttccccacggccgccagggtgcctgcaactgcacgcatgcgctgcatgacgcgcccccccacatacacacgcatgcgtcgcgcacccctcctgcgctggggggggacgcacggacttgggggcggggcgatggggaggaatgattggcagaggggaagggggtttttctgagctcaatggctcctctccttccccacacactcaacagcaataagtttctctacttcaagtgggcggacgggcctagcctgacctggcgcgggaggggctggccaaggggcgctctcagggatgggggcgggtcctgagtctgggggaggggaggtctgcaactctggtgctaatggcgggtcttcctggcccacccgcaggcagggaggaaggagtcggcaggctcctcccccaagcctcccccacgcccacccagggtgcatgaaccacccacgcagaagctgccgcatgtcaaccctccccccaacaaagaaacagtgtcatgcccctccccacctgccctcccactccccagcccaataaatgattccttttcatttacaaaaaaaaaaaaaaaaa

SEQ ID NO: 469 - DNA, 3975 bp, Rattus norvegicus
gtgaaagtttgcctcggtgctctcggtgtcgctgcggctctctgcatcccgggacagcagcgtggccctcgaccgcggcgcaggctctccagccactagcgagcaaggaagcgaacgaaccagggcggccaacacgccgtgccgggacccagctgcccgtatgaccgcgcggggcgccgcggggcgctgcccttcttcgacatggatgggctcccggctgctgctggtctgtctcctcgtgagcaggagtgttgccgaggtgtcggagcactgtagccacatgattgggaatggacacctacagattttgcagcagttgatcgacagccaaatggagactgcatgcctgatcgaatataaatttgtagaccaggaacagctggacgatcccgtttgctacctaaagaaggcctttgttttggtacaagtcataatcgaggaaaccatgcgctttaaagacaacacccccaacgccaacgccaccgagaggctacaggaactctctatgaaactgaacagctgctttatcaaggactataaggaacagaacgaggcctgtgtccaaacttacaaagagagtcctctccggttgctggagaaaatcaagaatttctttaacgaaacaaagaatttccttgaaaaggactggaatatttttagcaagaactgcaatgacagccttgctaaatgctctagcagagatgtggtgaccaagcctgattgcaactgcctgtaccctaaagccacccctagcagcgacctggcctctgcctcccctcaccagccccctgccccctccatggcccctctggctgacttggcttgggatgattctcagaggacagagggaagctccctcttgcccagtgatctgcctcttcgcatagaggacccaggcagtgctaagcagcgaccgcccaggagtacctgccagaccctcgagtcaacagagcaaccaaatcacgaggacccacaacctcatccttctgcgggggcccccatccctggggtggaagacattattgaatcttcaatgggcactaactgggtcttagaagaagcttctggagaggctagtgagggatttttgacccaggaaaggaagttttccccctccaatcctgtagggggcagcatccaggcagagactgacagaccctgggcccgctcagcatcttctccattccctaaattaacagaggatcaacagccaacgaatataacagacaccccgttgacagaggtgaaccctatgagacccactggccagacactgaataatactcctgagaagacggatggttcatctacactgcgcgaagaccagcaggagccacgctctccccattttgccacactgaatccccaacgagtcggcaactcagccaccccctatgctaagttactgcctcccaaaagccactcttggggcattgtactgccccttggggagctcgagggcaagaaaagtactagagatcgaaggagccccgcagagctgaaaggaggaccagcaagtgagggggcagccaggcctgtggcccaaagtactagagatcgaaggagccccgcagagctgaaaggaggaccagcaagtgagggggcagccaggcctgtggcccgttttaattccattcctttgaccgacacaggctcttctattcaggatccccagacctctgcgtttgtcttctgggtgctaggcatcatcctagtcttgctggctgtcgggggcctcctgttctacagttggaagcggaggagccatcgagaccctcggacattggattcttctgtggggcgaccagagggcagctccctggcccaggatgaggacagacaggtggaactgccagtgtagaaaggattctaagctgggcacacaggactatctctttatgggaggagacattatggcaacgtccaccactaccctctcctgtcatcttcctgggaatgtggtctgccactaccagagctcctgcctaccaagactggatgaaagcagctttgatggggatctttccatcctaacccttagactctcaactaaagagagagggctggaggatgcccccagtatcctgccactatttattgtgggccctggaggctcgctgcatttgaggaagggcagctcaacagctcaggaccctttcccttaggggctgttccctcctctcaaaaccagaacctggcaagggccacactagcctgtatggcccatgggagatcaggacagatgagaaggagcagaagagccctgtgcccagaagacccaactggtgccaaggaatcccaacgtggacaggcaggggcctgtttcccaagaagagagcctgacattcaaagggtgggacagcatctgcccaacttcccgtaaaggcataaaggcacgaagcccaaaaaacgggaagaggaggcctttggctgcttgtgatgacagcttaaaggggtctacaccctcaacttgcctaagtgccctctgctgatagccaggaaggagggagaccagccctccggacctatctgacctggctcatgatgccaagaggaagactgagctctaacctcatctcctcctgcccatagcccctgccagagttcttttgccagcagaggcacccctcatgaaggaagccattgcactgtgaatactgaacctgcctgctgaacagcctgtccaatccatccctatgagcgatcatccgtccgaatgttctcccacttccttcaacctctcctcagcttcttgcactgagctggcctcacatgttgactgagggagcccctaagcccgaccttcccccgcctcagcctttgattgtccagggtgaagctgtgggagaactgcctgggctaccagtcagagctggtctttaggctgtgttccttacccaggtttttgcatcttgcactttgacattcccaggagggaagtgactaggggaagggagagaagaaggggagacagagacaaaggccacaggcagagctataaatgagaatgggtcttgaaaatatgtgtgtacccctaagcttgaagttgatctctatactccagtcccttgccagctgccttcccctactgcctgaagcctggagctgagcaggttgtctggtcctgagctctgggtatggagctctgtgctccagccccaccctcttctggcctttgctctccagacctgactctggtagggaaggataccttcccagtctcacctacccccccccctgccatctctagccaagcaagccaggtctagagagggatcaaaaaaaaatgggtcatttacttccaactctgctctgatgctctgtttcctgagccaggctagtctgtggtgacctgggcatgggtgacagggctcttacttgctccttggtctctttatgctgctgccccgcctcccccctttcctgccctccctggctactgggtcgctaatctttcaggccatggatccggaggagagtggtctataggctccaccagccctgtcctgagacaacagagggggtgaggacactggagactttcccgtggggcttacttagccttctagttacagactatttccacactagaaaatacgtatttttaaatagaagaaaaacacagaaacaaacaaaaggcattctcctacccctccatcttaaacatacattattaaagacagaagagcaaatccaacccattgcaagaggctctttgtgggtgcctggttgcataagagcaggaggagccccaaacccacctttggagcttccctgcacaggaaccccttcttccctccaagaaagcccagagggagcactgcctcaccaactgtgagactgcgtttttttatacttggaagtggtgaattattttatataaggtcatttaaatatctatttaaaaaataggaagctgcttttatatttaataataaaagaagtgcacaagcaaaaaaaaaaaaaaaaaaaaaa

SEQ ID NO: 470 - DNA, 1546 bp, Rattus norvegicus
ccgggactccagcgcgggctaccccgcctccagctccggccagccagccctcggctctggacaaccccgatcccgccccacgctctcagctccgcctcagcaggagtctcagttgccccataagaccgcctgtgccaagctcagcatgggtgggggcctgattgagaggtatgtggctgccatggtgctgagtgcggctggtgataccctgggctacttcaacgggaagtgggaattccttcgggatggggagaagatacaccggcagttggcccagatgggtgacttggaagccatagatgtggcccagtggagagtcagcgatgacaccatcatgcacctggctacagcagaagccctcatggaagccggcagttccccggatttgcctcagctgtattccctactagctaaacattaccgggactgcatgggagacatggatggccgggcaccaggtggtgcttgcatgcagaatgccatgcagctggaccccgacagggctgacggctggaggattcccttcaacagtcacgagggcggctgtggagccgccatgcgcgccatgtgcatcgggctgaggtttcctcaccccagccagctggatactctgatccaagtgagcatcgagagcggccggatgacccaccaccaccccacaggctacctcggaagcctagcgtcagctctttttaccgcatatgccgtgaacggcaaatcaccacggcagtgggggaaggggctgatggaggtgctgccagaggccaaagcgtatgtcacccagtcaggctactttgtgaaggaaaatctccaacactggtcctacttcgagaaagaatgggaaaagtacctggaacttagaggaattttggatggcaagtccgctcccgtcttcccgaaaccctttggtgtgaaggaaagggatcagttctatatcgaagtgagctactcaggctggggtggcagcagtggacacgatgcccccatgattgcctatgatgccctcctggctgcaggggattcctggaaggagctcgcacacagagcctttttccatggtggagacagtgattccacggccaccattgctggatgctggtggggagttatgcacggtttcaaaggggtaaacccttctaactatgagaagctcgaataccgacagcggctagaagaggccggaagagctttgtattctctggggtcaaaagaagacactatactaggtccctagggaaagggtggtttgttttggcggttttttcccctgtatccccgacactcattctcttcagcttttccagcgtcaagaatcctaattttgtgtttgaagaattctgagtaaacaagtcccttgggcggcttcagccccgccttcccacgcttaccctgccctccccgagttcctcttttgtgtgtaagagtctttttatttcagttgatgtgctcagtgtttctcattccagaaacctcataaccttgtattcacgtctccatttttatcatggaattgttctaaaaaaaaaaaaaaaaaaaaaaaaaaaaa

SEQ ID NO: 471 - DNA, 787 bp, Rattus norvegicus
gcacttctcggatcctcagcccagtgcttctagatcctcagccctgaccagctcagccaagaccatgaccgagcgccgcgtgcccttctcgctactgcggagccccagctgggagccgttccgggactggtaccctgcccacagccgcctcttcgatcaagctttcggggtgcctcggtttcccgatgagtggtctcagtggttcagctccgctggttggcccggctatgtgcgccctctgcccgccgcgaccgccgagggccccgcagcagtgaccctggcccggccgttcagccgggcgctcaaccggcaactcagcagcggtgtgtcagagatccgacagacggccgatcgctggcgcgtgtccctggacgtcaaccacttcgctcctgaggagctcacagtgaagaccaaggaaggcgtggtggagatcactggcaagcacgaagaaaggcaggatgaacatggctacatctctcggtgcttcacccggaaatacacgctccctccaggtgtggaccccaccttggtgtcctcttccctgtcccctgagggcacactcacggtggaggctccgctgcccaaagcagtcacacaatcagcggagatcaccattccggtcactttcgaggcccgtgcccaaattggaggcccagagtcggaacagtctggagccaagtagaagccttcagcttgctacccatccccagtagccgtcaccagccctccctctctgtcaatctgaatgctcttttgatacatgtactttctgttttactcaaataaa

SEQ ID NO: 472 - DNA, 16453 bp, Rattus norvegicus
caggccatcttgaagagttttctgtggaaccttctccaagtcagcaggagaactcagcatggcattcagtgacagacatgtttctttcacctgtagatctacaaacaatattcagaagtacacaatcaaaatcatataaaacaaccattaaacatgaggacctagcacttaccataactccagagccctctctggaggatggatctattctgttcccacaggaagacctacttcaacccatagattccactgggcaaggtgaattttcacatatcaagaccagcaccctttcaaaacctccatatgtttccaacaccaaatcttcagcattccaagagaccatgtctgagacaacatacaactctaaacaggtggatctttcttccactcatctgaaaacctcagaactacctccagattacactatgggattagaaccttctctatatcagcaaattacccaatctagtcctaaaagcctccacgagaatccaaaatcatttccagtgctaaagccctctgcagctcaggccttaaaacctcctaggaaggaaaaactttctccaaccaataacatgattccacaccacccttcaaaaccactgaaaaatatggtaactcacattccagcgcacaaaatgacagttccaagacagatccaagaggatcaaggtgagtatacaatatcatctaatggttcattccagcctttggacctggaagtcactttaacttcaggaattattccagaggttaagcatatactaccaaagagaactgtaaatccacagacttattctcaagtgaaaatctcacattcacagcatgttgagactcagcatccaaactcagaaacaaccacagttcaacctttggatctggaatttgctataaatctgcaacctactcctaaggagaactttgctcaaactttccaggataccacaactcagatgatagggccacctaaagaggttatagctcaagctccagaacatcatgaggggacaattccaataccaattcaggatcaagctgagtattcaactttacccactgtctcattccagccattagaccaggaactcaccataacttcagaggctatcagagagcctcctcatcctacagttccacagcagactataatacttcatcctccagagcaccctttggtgatacattcagaacaagtttacactcagcatccaaacccaactgaagccataattcaacctttggatctggaacttaccataactccacaacctactgctgagggagaacttcctcaaactctacaagacagcacaactcagatcatagaaccacctacagtggttgtaggtccagtcccaatctatgaggaggtgacagttcaaacaacaagtcaggatcaagctgagtatccaccttcacccactgtctcatttcagtccttagacctggaactcaccataagtccagaggctaccagagagtcttaccatccttcattgctacagcagactacaatagttaatcctccagagcaccctctggtgatacattcagaacaagttcacactcagcatccaaacctaactgaagcgacagttcagcctttggatcctgatcttaccataactccacaacctactactgagggagaacttcctcaaactctacaagacagcacatctcagataatcatagaaccacctataaaggttgtagctctagtcccagtctatcaggaggtgagtcaggatcaagctgagtatacaacctcatctactgtctcatttcagccattagaccaggaactcaccataacttcagaggctatcagagagcctcatcatcctacagttccacagcagactataacagttcatcctacaaagcaccctctggtgatacattcagaacaaactcagcatccaaacccaactgaagtgacagttcaacctttggatctggaacttaccatgactccacaacctactgctgagggagaacttcctcaaactctacaagacagcacaactcagatcatagaaccacctacagtggttgtaggtccagtcccaatctatgaggaggtgacagttcaaacaacaagtcaggatcaagctgagtatccaccttcacccactgtctcgtttcagtccttagacctgggactcaccataactccagagcctactgaacattttataactcaaaagactactgtttttcctccaatgtacactgatgtgacacttccacaacaagtttctgttcagcacctaaagccaactgaaggcatagttcaacctctggatctggaacttaccataactccacaacctactcctgaaggagaactttctcaaactgtgcaggagagcacaactcaaaataaagaacctcataaagaggttgtagctccagtccctgtatatcaggcagtaacagttccaacaccaagtcagtatcaagctgagtatcaaaaatcattgcagccgttagatctagaactcacggtaacttcagagcctacaaaagaggcttaccattctacaatttctaagaactctctggcgataaatccacaatatgttcacattcagcatccaaacccagctgaagccacagttcaacctttggatctggaacttaccataagttccagtctacaacctactgctgagggagaacttttatacagtatgcaagagaccgtaactcagatttcagaaccacctaaacaggttgtaactccagtcccagaatatcaagaagtggcagttccagcacctgttcaggatcaagccaagtatccactttcatccattgtctcattgaattccttggaccaggaactcactctaagttcagagctccttggagaggctcaccaactgacaactccagatgagactatggttctaccgccaaaggaccgtcaaggaatatatccagatcatgatcatcataagcatttaaatctaactgaggtcaccaatcaacctttccatttagaacatactgttcagcatcaacctactattgaggaggaacgttcacaaagcattcagaagaagacaacacaaattacagaaccaggcaaaaaagttgtacctctagctcaagaaagtgaagaggtgacaattccaatgccaatactaaaagaaactgcatttccaacacctcacagtatggcattacaatctttggatgagaaattaacaatacattcacattctcctggctggactcaacagcatgcaaacctaaaagaaagtaaaggacatacaactggaaagattttacttgattatgcagaacccaacatggaaatagaacttaaacatcatggcctgtttcttctcaagactacagaagctacaacagaaagtgagaacacaaatcagatgacaaaatcactgaaacaggttacagctcttttcacacaaaataagaagagcatgctaccagctctagttgagagtcaagatgagtctcaacccccaccaaatatgtcattacagcctctggaccaggaactcaccctatcttctcaacctcatggttgggtaccccacattccaaatacaccagaaaagatttaccttcattatgcagaacctcccacaggaccatttgttgaacctccggaactattttttctcaaaactacaaaatctaggcctgtgcaggggactgcaacacagatggccgcatcacctaaagagatggtttctcgagctccggaaaataaggaggctgttctttcaggtccaggtgaggatcaagatgagtctccatccccacccaatatgtcattacaatctctggatcaggaactcaccctgtcttctcaacctcatggttggattccccatcctccaaatacacatggcaagatttaccttcattatgctgaacctcccacaggaccatttgttgaacctccagatctgttttttctcaaaactacaaaatctaaacctgtggagtggaccctaacacggactgacaaatcacgtaaagagatggtttctcaaagtcccaaatatgaggaggctgttttgccagttcatggtgagggccaagaggagtctagatccccacccaatatgtcattgcaatctctggaacaggaactcaccctgtcttctcaacctcatggttgggttccccaccctccaaatacacatggcaagatttaccttcattatgcagaacctcccacgggaccctttgttgaacctccagatttgttttttctcagaactacaaaatctaagcctgtgcaggggactgcaacacggatggtcaaatcacctgaagagatggtttctctagatccggaaaataaggaggctgtttttccagcacagggtgagggtaaaggtgagtctccatcctcacccaatatgtcattacaatccctggatcacgaactcttcatgtcttctcaacctcatggttggattccccaccccccaaaaacaccagacaagatttaccttcattatgcagaacctcccacgggaccctttgttgaacctccagatttgttttttctcagaactacaaaatctaagcctgtgcaggggaccacaacagagatggccaaatcacctaaagagatggtttctcaaactccagaatataaggaagctgttctttcaggtccaggtgaggatcaagatgagtctccatccccacccaatacgtcactaaaatctctggatcaggaagtcgccatgtcttctcaacctcatagtggggttccccaccctccaaagacaccaggcaagatttaccttcattctatagaacctccaccaggaccctttgttaaacctacagatctgattttggtcaaaactactacaaaatctaaacctgcggagtggaccccaagacggattgacaaattacttaaagagatggttcctcatagtcccgaatatgaggaggctgtttttccagctcatggtgagggtcaagatgagtctggatcaccacccaatatgcctttacagcctctggaccaggaactcaccctatcttctcaacctcatggttgggttccccaccatccaaatacaccaggcaaaatttaccttcattatgcagaacctcccacgggaccatttgttgaacctccagatttgttttttctcagaactacaaaatctaagcctgtgcaggggtccccaaaagagatagccaaatcacctaaagagatggtttctcaaactccagaatataaggaagctgttctttcaggtccaggtgaggatcaagatgagtctccatccccacccaatatgtcactaaaatctctggatcaggaagtcaccatgtcttctcaacctcatagtggggttccccaccctccaaagacaccaggcaagatttaccttcattctatagaacctccaccaggaccctttgttaaacctacagatctgattttggtcaaaactactacaaaatctaaacctgcggagtggaccccaagacggattgacaaattacttaaagagatggttcctcatagtcccgaatatgaggaggctgtttttccagctcatggtgagggtcaagatgagtctggatcaccacccaatatgcctttacagcctctggaccaggaactcaccctatcttctcaacctcatggttgggttccccaccatccaaatacaccaggcaaaatttaccttcattatgctgaacctcccacgggaccatttgttgaacctccagatttgttttttctcagaactccaaaatctaagcctgtgcaggggacaccaacacaaatggccaaatcacctgaagagatggtttctctaagtccgaaaaataaggagactgtttttccagcacagggtaagggtcaagatgagtctccatctccacccaatatatcattacaatccctggatcaggaaatcaccatgtcttctcaacctcatggttggattccccaccctccaaatacacatggcaaaatttaccttcattatgcagaacctcccacaggaccctttgttgaacctccagatctgttctttctgaaaactacaaaatctaagcctatgcaggggtccccaaggcagattgacaaatcacctaaagagatgtttactcaaagtcctgaatatgaggagtctcttcttccagctcatgctgagggtcaagaggaatctagagcccccccacatttttcattacagcctctggatcaggaactctccctgtcttctcaccctcatggttggattccccaccatccaaatacaccagacaagatttaccttcattatgcagaacctcccacaggaccctttgttgaacccccagatctgttctttctgaaaactacaaaatctaagcctgtgcaggggaccgcaacaaagactgacaaatcacctgaagatagggtttctcaaactccagaatataaggaagctgttctttcaggtccaggtgaggatcaagatgagtccccatccccacccaatatgtcattacaatctctggatcaggaactcgccatatcttctcaacctcatggttggattccccactctccgaatgcaccagacaagatttaccttcattatgcagaacctcccacaggaccatttgttgaacctcccgatctgttctttctgaaaactacaaaatctaagcctctgcaggggaccccaacacaaatggccaaatcacctaaagagatggtttctcaaactccagaatataaggaagctgatctttcagctccaggtgagaatcgagatgagtctccatcctcacccaatatgtcattacaccctctggatcaggaactctccctgtcttctcaacctcatggttggattccccaccctccaaatacacatggcaagatttaccttcattatgcagaacctcccacaggaccatttgttgaacctccagatctgttctttctgaaaactacaaaatctaaacctgtgcaggggtcaccaagccagattgacaaatcacctaaagaggtgttttctcaaagtcctgaatcagaggagtctgttcttccagctcaggctgagggtcaagaggaatctagagccccaccacacatgtcattacaacttctggatcaaaaactcaccctgtcttctcaccctcatggttggattccccaccatccaaatacaccaggcaagatttaccttcattatgcagaacctcccacgggaccatttgttgaacctccagatctgttctttctgaaaactacaaaatctaagcctgtgcaggggtccccaaggcaggttgacaaatcacctaaagagatgtttactcaaagtcctgaatatgaagagtctgttcttccagctcaggctgagggtcaagaggaatctagagccccaccacatatgtcattacagcctctggatcaagacctcaccctgtcttctcaccctcatggttggattacccaccatccaaatacaccagacaagatttaccttcattatgcagaacctcccacaggaccctttgttgaacctccagatttgttttttctcagaactacaaaatctaagcctgcacagtggaccccaacacagatggccaaatcacctgaagagatggtttctctaagtccggaaaataaggagactgttttcccagcacagggtaagggtcaagaggagtctatatccccaccacatatgtcattacagcctctggaccaggacctcaccccgtcttctcaccctcatggttggattccccaccatccaaatacacatggcaagatttaccttcattatgcagaacctcccacaggaccctttgttgaacctccagatctgttctttctgaaaactacaaaatctaagcctgtgcaggtgtccccaaggcagattgacaaatcacctaaagaggtgtttactcaaagtcctgaatatgaagagtctgttcttccagctcaggctgagggtcaagaggaatctagagcccccccacatatgtcattacagcctctggatcaagacctcaccctgtcttctcaccctcatggttggattacccaccatccaaatacacatggcaagatttaccttcattatgcagaacctcccacaggaccatttgttgaacctccagatctgttctttctgaaaaccacaaaatctaagcctgtgcatgggtccccaaggcagattgacaaatcacataaagagatgtttactcaaagtcctgaatatgaggagtctgttcttccagctcaggctgagggtcaagaggaatctagagccccaccacatatgtcattacagcctctggatcaagacctcaccctgtcttctcaccctcatggttggattccccaccatccaaatacaccagacaagatttaccttcattatgcagaacctcccactggaccatttgttgaacctccagatctgttctttctgaaaactacaaaatctaagcctgtgcaggggtccccaagacagattgacaaatcacctaaagagatgtttactcaaagtcctgaatatgaggagtctgttcttccagctcaggctgaggatcaagaggaatctagagccccaccacatatgtcattacagcctctggatcaggacctcaccctgtcttctcaccctcatggttggattccccaccatccaaatacaccagacaagatttaccttcattatgcagaacctcccacaggaccctttgttgaacctccagatctgttctttctgaaaactacaaaatctaagcctgtgcatgggtccccaaggcagattgacaaatcacctaaagaggtgtttactcaaagtcctgaatatgaagagtctgttcttccagctcaggctgaggatcaagaggaatctagagccccaccacatatgtcattacagcctttggatcaggacctcaccctgtcttctcaccctcatggttggattacccaccatccaaatacaccagacaagatttaccttcattatgcagaacctcccacaggaccctttgttgaacctccagatctgttctttctgaaaactacaaaatctaagcctgtgcatgggtccccaaggcagattgacaaatcacctaaagaggtgtttactcaaagtcctgaatatgaagagtctgttcttccagctcaggctgaggatcaagaggaatctagagccccaccacatatgtcattacagcctctggatcaggacctcaccctgtcttctcaccctcatggttggattacccaccatccaaatacacatggcaagatttaccttcattatgcagaacctcccacaggaccctttgttgaacctccagatttgttttttctcagaactacaaaatctaagcctgtgcagtggactccaacacagattgacaaatcacgtgaagagatggtttctcaaagtcccgaaaatgaggaggctgatattccacgtcatggagatggtcaagatgagcttagaaacccccccattatatccttacagcctctggaccaggaactcaccctgtcttctcaacctcatggttgggttccccaccctccaagtacaccagacaagatttaccttcattatgcagaacctcccacaggaccatttgttgaacctccagatctcttttttctcagaactacaaagtctaagcctgtgcaggggaccccaacacagttagccaaatcacctaaagaaatggtttttcaaactccagaatataaggaagctgttctttcagctccaggtgaggatcaagatgagactccatcctcacccaatatgtcattacaatctcttgatcaggaactcaccatgtcttctcaacctcatggttggcttccccatcctccaaatacacatggcaagatttaccttcattatgcagatcctcccacaggaccctttgttgaacctccagatctgttttttctcaaaactacaaaatctaagcctgtgcaggggactgtaacacagatggacaaatcacctaagcagggttttcttccagcccatggtgaggctcaagatgagtctagatcaccacccaatatgtcattacagcctgtggatcaggaactctccctgtcttctcaacctcatggttggattacccatcctccaaatacaccaggcaagatttaccttcattatgcagaacctcccactggaccctttgttgaacctcccgatctgttctttctgaaaactacaaaatctaagccccttgctggttccccaacacagatggccaaatcacctaaagagatgttttctcaaactctagagcataaggaagctgttctgtcagctccaggtgaagatcaagatgagtctccatcctcatccaacatgtcattacaatctctggatcaggacattaccctgtctcctcaacagtatggtcggattccccaccctgtaacttcaccaggcaagatttaccttcattacgtagaacatcctactgtaccattgtttcaacatccaaatatgttttctacaaaaactacaacatcaaagcctttgcagctgacccaaacgcagatggcgaaatcacctgaagagatagtttctctacgtccggaatataaggaggctattcttccagcgcaggttgagagtcaagaggagtctgtattcctacctaatatgtcattacaatctctggatcaggaactcaccctgtcttctcaacctcatggttggattccccaccatccaaatacaccagacaagatttaccttcattatgctgaacctcccacaggaccatttgttgaacctccagatctgttttttctcaaaactacaaaatctaaacctgttcagtggaccccaacacagattgacaaatcacttaaaaagatggttgctcaaagtcccgaatatgaggaggctgtttttccagctcatggtgagggtcaagatgagtctagatacgcaccaaatatatccttacagtctctggaccatgatatcaccctatcttctcaacctcatggttggattccccaccctcctaatacaccagacaagatttaccttcattatgcagaacctcccacgggaccatttgttgaacctccagatctgttttttctcaaaactacaaaatctaagcctgcacagtggaccccaacaccgatggccaaatcacctgaagagatggtttctctaagtctgaaaaataaggaggctgttcttccagctcagggtaaagatgaagaggagtctatatccccccccaatatgtcattacagcctcttgatcaggaactcaccctatcttctcaacctcatggttgggttcaccaccctccaaatacacatggcaagatttaccttcattatgcagaacctcccacaggaccctttgttgaacctccagatctgttctttcttaaaactacaaaatctaagcctgtgcaggggactataacacagatggtcaaatcacctaagcagggtcttcttccagcccatggtgaggctcaagatgagtctagatcaccacccaatatgtcattacagcctgtggatcaggaactctccctgtcttctcaaccccatggttggattacccatcctccaaatacaccagacaagatttaccttcattatgcagaacctcccactggaccatttgttgaacctccagatctattttttctaaagactacaaaatctaagcccttgctgggtaccccaacacagatggccaaatcacctaaagagatggtttctcaaactccggaatataaggaagctgttctttcaggtgaggatctagatgagtccacatcatcacccaatatgtcattacagcctctggatcaggaactcagcctgtcttctcaacctcatggtcggattccccaccctgtaacttcaccaggcaagatttaccttcattatgcagaacctcccactggaccatttgttgaacctccagatctgttttttcttaaaactacaaaagctaagcctgtgcaggggactgcaacacatgtggagaaatcacctaaagaaatggtttttagaagtccagaatataagcaggctgttcttccagcccatggtgaggctcaagatgagtctagatccccaccaaatatgtcattacagcctctggatcaggaactcaccatgtcttctcaacctcatggttggattccccaccatccaaatacacacggcaagatttaccttcattatgcagaacctccaacaggaccctttgttgaacctccagatctgttctttctgaaaactacaaaatctaagcctgtgcaagggaccgcaacacagatggccaaatcacctgaagagatggtttctctaagtctggaaaataaggaggctgttcttccagctcagggtgatggtctagaggaatccatattcccacccaatatgtcattacagcctcttgatcatgaactcatcctgtcttctcaacctcatggttggattacccaccctcccaatacacccagcaatatttaccttcattatgcggaacctccaacaggaccatttgttgaacctccagatctgttttttctcaaaacgacaaaatctaagcctgtgcaggggtccccaacactgatagccaaatcacctagagagatggtttctagaagtccggaatataagcaggctcttcttccaggtcatggtgagggtaaaaatgagtctagatccgcacctaatatgtcattacagcctctggatcaggaactcaccatgtcctctcaaccttatggttggattccccatcctccaaatacaccaggcaagatttaccttcattatgcagaacctcccaccggaccatttgttgaacctccggatctgttttttctcaaaactacaaaatctaagcctgtgcagtggacctctgcagaaatagccaagttacctaaagagattgtttctcaaacccagaaacataaggagagtgttcttagagccccagttgagcaacacaataagtctccttccccacccaatgtgtcattacaacctctggatcaggaactcagcctattttctcaacctcatggttggattcctcactctccaaatacaccaggcaagatttaccttcattatgcagaacctcccacaggaccatttgttgaacctcctgatctgttttttctgaaaacgactaaatctaagcctgtgcagggaactccaacatatatgaccaagtcacctcaagagattgtttctcaaagtccagaaggtatggaggctggccctcccaccaaagttgaggttcaagatgagtctccatcatcgccccatgcatcattacagactttggatcaggaacttaccctatcttctcaacctcatggttggattccccaccctccaaatacagccggaaagatttaccttcattatgcagaacctcccacaggaccgtttgttgaacctccggatcttttttttctcaaaactacaaaatctaagcctgtgcaggggacagccactcagagtacccaatcacctaaagagattatttctccaagtactagatataaggagagtgttcttacagctgcagttgtgggtcaagatgaatctcaatcccctcccaatatatcattacagcccttggatcaggaactcaccttatcttctcaacctcatgttttgatttcccacccttcaagtacaaatgcaaatacaggccacacactaggcaagatttacatgcattatgcagaacctcccaagggaatgttagttgaacctccagatcttttttttctcaaaactaaaatacttaatagacctgtactggagaccccaactcaaattccaaaatcagctaaagaagttgtagctcacacagtagaaagtgagaagggggtgcttcaagtcccaatcaaaggtcaagctgagtctcctccaccacccaatatgtctctacagcctttgattcaggaacttaccacattttctcaatctccaagttggactgaccaccctccaaattcgaaggagactaaaaattatacaccaggcaaaatttatcttcattttgcagaccctcccatgggcctggtagttgaacctcctgatctgttttttctcaaaactacaaaatctaaacttgtgcaggggaacccaactcagattaaaaaatctcctaaagaggttgcagctcacaccgtagaatataaggaggctgttcttccagctccacttgagggtcaagacaagtctcccataccacccactatgtcattacaatctttggatgaagaactcatcacaccttctcattctcctagtgggactcaccattctccaactcctatagagactaaaagacatatgtcagggaagatttttcttaatcatgcagaacttcccatgagaatggtagttgaacccctggatctgttttttctcaaaactacagaatctaaaccagtgcaggagatcccaattcagattacgaagtcacctaaaaaggttgtagctccaagtgtagaatataagcagtgggtcgttccagctccagttgatggtcaagacgattctccaactccacccaatgtttcattactgcctttggatcaggaaatctccatatcttctcctcctggaagggctcagcaacctccaaatccaaaggaaagtaaagaacatgagccacaagtggttttctttcagcatccacacccttcagtgggaatggtagttgaacctctagatctgtcctttctcaaaactacagaatctaaacctgtgcaggagtcccttgctcagaatactgagtctccaaaagaggttgtagttcaaactctagaatataaagaggtagtggtttcatctctaattgagggtaatgataaatacctaacacccagtgttccatatcaacctttaaacctggaactttttgaatcttctggctctactactgaggctcatcattctaccacttcaatgagactacagtccttcttcaattcatcaagtcgtaagtccacttttgcactcagaattttctgtaactcaacaacctaatacaatggttaaacgttctgctcgaatgaaggagactccaactcagacttcagagatacctatggagaccgtaacccaatctgtagaatattattcatcaacttcagtttatgttgatactcagcattcaaatttatcagctttggaaaccgcacaatctgacgtcctgacaactatagcctcttttccaaagactgcacatcctgaagtcccaagaactatagcttcttatccagaggcttcactttgtgaagtcccaacaactacagttctttatccagtggccacacattttggagtctcaacaactataactgcttctccagagtttgcacattctaaagccccagggactacagctcctactccaaaatgcataacaggtctacctccagatcaggctgagagacatccaagctcaactgcagtcacggttcaagttttgaaaatggaatctaccataactccatattctgaaaattctaatacagaaaatgatttaagtatagaaaaaaatgcctacaactacaccaacatatgtgacttctgcttatgtgaaaatgagacactgttgtgtgttcatcccaacccaatatggagactccagcaagtgcctgtgccaaggcccagcacctacaatgacacttttgctatcttaaatttcaaaggaaatgatatttcttacattgacaaaaatgtatggaaggtataccgttggactgagaaactaattctcagtgaaaatcacctgactgaattgcataaggattcattcgaaggcctgctgtccctccaggttttggatttatcctgcaataaaatacgctatattgaaagagggacatttgaatcattaccttttctgaagtatatgaaccttgggtgcaatttactcactgaactgagctttggaacatttcaggcatggcatggaatgcagtttttacagcagctaattctcagccgaaatcctctcactgttgttgaagtccctactttttaaattgccagcactaaaatatctggacctggggaccacacaggtgcaactgacaacagttgagaacatcctcatgaagactctggagcttcaacatctgatcttacctcccacatggccccgtgctgaggtagggcatcaccgtgctgggagcatgcgggagacgactgctcaattctcagtagacgagaagaagagtgtgaggaggggacatggaaccaggtgaagcctccaaatacactcctggtgacctactttctgaagccaggccccatctgctaaagattccagaacctcccagaacagtcaccagctggaaaccaagcatcagacacacaaacttatggaggacctttttttttttttc

SEQ ID NO: 473 - DNA, 1182 bp, Rattus norvegicus
gttcccgggtcgtgctccgcgctcactgcagccaccttcgccgcccaccgtctcctccaacgcggactccggcagctttctcgccagagtcctcgaaactcgactaattccttacgcgtacgaccagaccaccggcgtgccccaccatgtcagacgcggcagtggacaccagctccgagatcaccaccaaggacttgaaggagaagaaggaagttgtggaggaggcagagaatggaagagacgcacctgccaatgggaacgctcaaaatgaggaaaatggggagcaggaggctgacaatgaggtagatgaagaagaggaagaaggtggggaggaagaggaggaggaggaagaaggtgatggtgaggaagaagatggagatgaagatgaggaagctgaggctcctacgggcaagcgggtagctgaggatgatgaggatgatgatgttgagaccaagaagcagaagaagactgatgaggatgactagacagcaaaaggaaaagctaaccttacgcaccgtgacctattcaccctccacttcccgtctcagaatttaaacgtggtcaccttcgagtagagaagcaggcccccgcccgcccactgcgcgagtgccacccaccaatgacatgcgctcttcaccaccccaccaaaaccacaacatgaattggcaacatgggaggagaaaagaaccagaacttcccaggccctgctttttttcttaaaaatactttaaaaggaaaatttgtttgtattttttatttacattttatatttttgtacatattgttaggggtcagccatttttaatgataacgggtgaccaaaccagccttcagagcgttttctgtcctacttcagactttacttgtggtgtgaccatgttcattatactctcaaaggagaaaaaaaaccttgtaaaaaaaacaaaaacaacaacaaaaaaacaatcttattctgagcattccagtaactttttttgtgtatgtacctagctgtactataagtagttggtttgtatgagatggttaaaaaggccaaagataaaaagattttttttcctttttttttgtctatgaagttgctgtttatttttttggcctgtttgatgtatgtgtgaaacaatgtccaacaataaaccggaattttattttgctgagttgttccaaaaaaaaaaaaaggaatcc

SEQ ID NO: 474 - DNA, 1309 bp, Rattus norvegicus
gaattccgttgctgtcgctagctctctctcttttttttttacagcttaatatttgtggtgcaatttgaagtgaactgaaccgggtgatttcacttctctcacaggagcatctggacagtacaccacttgtgatggagacttctatgcctgaatactatgacgtttttggtgatttccatggatttttaatggataaacggttcaccaaatattgggaagacgttgaaacattcttggcaaggccagatgaccttctcattgttacttatcctaaatctggcagcacatggattagtgaaattgtggatatgatctataaagaaggtgatgtggaaaaatgcaaggaggatgcactttttaacagaatacctgacctggagtgcagaaatgaagatctaataaacggaataaaacaactaaaagaaaaggaatcgcctagaatagtgaaaactcacctgccagctaagctccttccagcatcattttgggaaaagaattgcaagataatctatctttgccgaaatgccaaagatgtcgtcgtttcttattactactttttcctgatcatgaaaagttatccaaatcctaaatctttttctgaatttgtggagaaatttatggaagggcaagttccgtatggttcctggtatgatcatgtaaaatcttggtgggagaagagtaagaattcacgtgttttgtttatgttctatgaggacatgaaagaggatatccgaagagaagttgtgaagctgatagagttcctggagagagacccatcagcagagctagtagacagaatcattcaacatacatcattccaggagatgaagaacaatccatgcaccaattattcaatgctgccagagaccatgatagatctaaaagtatcgcctttcatgagaaagggaattgtaggagactggaagaaccacttccctgaagccctgagggagagatttgaggagcactaccagcagcaaatgaaggactgccctgtgaaatttagagcagagctctgagacaattccttgtgtctgaaattggagtagtctccaatttatccttcagtttttcttgttttgaattcagtagaagtagaagtcttttgaagactgagggtttaaattcattctggtttttttaatctaacttttatatcaatctagtttctgaatgttttgttggcaaaataacatttttcatatatacatatatatacatatatatatatatatatatatatatatatataacacaagcattgtcctctaatagtgttcaaagatttctaataaaaaaaccggaattc

SEQ ID NO: 475 - DNA, 2816 bp, Rattus norvegicus
ggcggccgctccgggacgcgcccgcgcgctgcccggctctcccccccttcgggctgccgctgctgctgctgtgactgctgcggcgcgaggaggaggaggcagcgggggagggggaggccgggcgcggaacggagcggggcgctgcaccccgggcgacgggttgcttctgcctctagcttctctctctctctctctctctctctctctctctctctctctctctctctctctctctctctctaattcttgaggggtggttgcagcttttgctacatgccttgccagcgccggagcctgcggtccaactgcgctgctgccggagcgctcagtgccgccgccgctgcccgctccccccgctccccactccgaacccgccggtcgctcgccgcgctgctgctcggctcctgcgccgccgccgtcgccgccccccgacgcctgggtgatgctggacatgggagataggaaagaggtgaaaatgattcccaagtcctcgttcagcatcaacagcctggtccctgaggccgtccagaacgacaaccaccacgcgagccacggtcaccacaacagccaccacccccagcatcaccatcatcatcaccaccaccaccacccgccgccgcccgcgcctcagccgccgccaccgccgccccagcagcagcagcagccgcccccggccccgcagcccccgcaggcgcgcggcgccccagcagcggacgacgacaagggcccccagccgcttctgctcccgccgtccgccgccctggacggggccaaggctgacgcacttggagccaaaggcgagccaggcggcgggcctgcggagctggcgcccgtcgggccggacgagaaggagaagggcgcgggcgctgggggggaggagaagaagggggcgggcgagggcggcaaggacggggaggggggcaaggagggcgacaagaagaacggcaagtacgagaagccgccgttcagctacaacgcgctcatcatgatggccatcaggcagagtcccgagaagcgcctgacgctcaacggcatctacgagttcatcatgaagaacttcccttactaccgcgagaacaagcagggctggcagaactccatccgccacaacctgtccctcaacaagtgcttcgtgaaggtaccgcgccactacgacgacccgggcaagggcaactactggatgctggacccgtcgagcgacgacgtgttcatcggcggcacgaccggcaagctgcggcgccgctccaccacgtctcgggccaagctagcctttaagcgcggggcacggctcacctccaccggcctcaccttcatggaccgcgccggctccctctactggcccatgtcgcccttcctgtccctgcaccaccctcgcgccagcagcactttgagttacaacgggaccacgtcggcctaccccagccaccccatgccctacagctccgtgttgactcaaaactcgctgggcaacaaccactccttctccaccgccaacgggctgagcgtggaccggctggtcaacggggagatcccgtacgccacgcaccacctcacggccgctgcgctcgccgcctccgtgccctgcggcctgtcggtgccctgctccgggacctactccctcaacccctgctccgtcaacctgctcgcgggccagaccagttactttttcccccacgtcccgcacccgtcaatgacttcgcagaccagcacgtccatgagcgcccgggccgcgtcctcctctacgtcgccgcaggccccctcgaccctgccctgtgagtctttaagaccctctttgccaagttttacgacaggactgtccgggggactgtctgattatttcacacatcaaaatcaggggtcttcttccaaccctttaatacattaacatcccggggaccagactgtaagtgaacgttttacacacatttgcattgtaaatgataattaaaaaataagtccaggtattttttattaagcccttccccccatttctgtacgtttgttcagtctttagggttgtttactattctaacacggtgtggagtgtcagcagcgaggtgcaatgtgggagaatacattgtagaatataaggtttggacgtcaaattatagtagaatgtgtatctaaatagtgactgctttgccatttcattcaaacctgacaagtctatctctaaaggctgccagatttccatgtgtgcagtattataagttatcatggatctatctggtggacgcaggccttgaagaacaacctaaattatgaagagagttttaaaatgttaaactgtaatttgtatttaagaatttgtagtaaaggtgcccaagaaattatattggccatttattgttttgtccttttctttaaagaactgtttttttccttttgtttacttttagaccaaagattggattctagcaaatgcacttggtatactaagtattaaaacaagcaaacaaacaaacaaaaaaaggaaggttgtttagtttggcaacactgcccattcaattgaatccgaaaggacaaaattaaggattgccttcagtttgtgttgtgtatatttcgatgtatgtggtcactaacaggtcacttttattttttctaaatgtagtgaaatgttaatacctattgtacttataggtaaaccttgcaaatatgtaacctgtgttgcgcaaatgccgcatcaatttgagtgattgttaatgttgtcttaaaaattcttgattgtgatactgtggtcatatgcccttgtttgtcacttacaaaaatgtttactatgaacacacagaaataaaaaataggctaaattcatatat

SEQ ID NO: 476 - DNA, 404 bp, Rattus norvegicus
caggcttcctcatcaaaatgaagtggcctgttaggctgttggtgctgttcttctggattcctgcttccaggggtgatgttgtgatgacacaaactccagtctccctgcctgtcagccttggaggtcaagcctctatctcttgccggtcaagtcagagcctggtacacagtaatggaaacacctacttgcattggtacctgcagaagccaggccagtctccacagctcctcatctatcgggtttccaacagattttctggggtgccagacaggttcagtggcagtgggtcagggacagatttcaccctcaagatcagcagagtagagcctgaggacttgggagattattactgcttacaaagtacacattttccgtacacgtttggagctgggaccaagctggaa

SEQ ID NO: 477 - DNA, 2722 bp, Rattus norvegicus
aaaggcgcagagataggaccagtgctcggcgcccgcttggctggctgactgcgctcttgcaagcaccggtgccagctctccaagatgaagaagctccaggaagctcacctccgcaagcctgtcaccccagacctgctgatgactcccagtgaccagggtgatgtggacctggatgtagactttgcagcagacagaggcaactggacgggcaagctggacttcttgctgtcctgcatcggctactgtgtgggcttgggaaatgtctggcggtttccctatcgagcctacaccaatggaggcggagccttcctcgtgccctacttcctcatgctggccatctgtggcatccccctcttctttcttgagctctccctgggccagttctccagcctgggacccctggctgtctggaaaatcagccccctcttcaaaggtgcgggtgcagccatgctgctcatcgtgggcctggtggccatctactacaacatgatcatcgcctacgtcctcttctacctcttcgcctccctcaccagcaacctgccctgggagcattgcggcaactggtggaacacagaacgctgcctggagcacagaggccccaaggatggcaacggggcactgcctcttaacctcagcagcactgtcagccccagtgaggagtactggagccgatatgtcctgcacattcagggcagccagggcatcggccgacccggggagattcgctggaacctctgcctctgcctgctgctggcctgggtcatcgtgtttctctgtatcctgaagggggtgaagtcctcgggcaaggtggtgtatttcacagccacctttccctacctcatcctgctcatgctcctggttcgaggagtgacccttcccggggcctggaagggcatccagttctatctcaccccccaattccaccacctgctgtcttccaaggtgtggattgaagctgctcttcagatcttctactctctaggagtgggttttgggggtcttctcacctttgcctcctacaacacattccaccagaacatctacagagacaccttcattgtcactctgggcaatgccatcaccagcatcctggctggttttgctatcttctcggtgctgggctacatgtcgcaggagctgggtgtgcctgtggaccaagtggccaaagcaggccctggcctggcctttgttatctacccacaggccatgactatgttgcctctgtcacccttctggtccttcctcttcttcttcatgcttctgactcttggcctcgatagccagtttgcctttctggaaaccatagtgactgcagtgaccgatgagttcccatactacctacggcccaagaaggcagtgttctcaggcctcatctgtgtagccatgtacctgatgggactgatcctcaccaccgatggggggatgtactggctggtccttctggatgactacagcgccagcttcggactcatggtggtggtgattaccacatgcctcgctgtcacccgggtatacggcatccagcggttttgtcgtgacatccacatgatgctgggcttcaagccaggactctacttcagggcctgctggctgtttttgtctccggccacactcttggccttgctggtgtacagtatcgtcaagtaccagccctcggaatacggtagctatcgcttccccgcctgggccgagctgctaggcatcctgatgggcctgctctcctgcctcatgatcccagctggcatgctggtagctgtgcttcgagaggagggctcgctctgggagcgacttcagcaagccagccgtcctgctatagactggggcccatcactggaagagaaccggacgggcatgtatgtggccaccctggctgggagccagtcaccaaaaccactgatggtacacatgcgaaaatatgggggcatcaccagcttcgagaatacagccattgaggtggaccgtgagatcgcagaggaggaagaggagtccatgatgtgagaccagacacctccaaacaggagggctggtcggggcctccccgtctgtcccttccttggccacaggggatagctttgtctgttgggattctgacaggcaatgggaggttgccatggcaacgacagtccccagcctaagtccctctttgtggcctctacatctcctggaacctctagatggacatacatatactaggtaacccattcaaagctgaaacgattcagctcagccctcagtttgtgagggggtgcgttgaagccagggagagaagagctggaccaaggtgacatgcccaagaggacttgttcccaagcctcctccagccagtcaactccctttcccttgggggagcaagcaccatatctgacatctttgttcagacactttgacaagatacatttccatacaagccaactttaaaccccaggttcagggtagcgagaacctggagagccccaaggccctggatatagatagaatggcagcgaccaaattgggtagaaaagtctttgtgggttcctgtgttaaggccagttttcccagaagaagtgggagctttagggctgagaggtgtgaaagattgcagaagaggctagagggaaggtttgcgggtcagagctgcccctgagccaggaggaggcccaacctgccagagcagagaccaggaggggctggagattgtggtgctcccgggttatgagagggaataaagactcgcagggcc

SEQ ID NO: 478 - DNA, 886 bp, Rattus norvegicus
ctgcagggtatgtgatgggcagctctctactcagatgagtctcttcctttcaggagtacctgtgtacaggttgggaggttgggcactagaccacttgattgctgcctctctccctgactctgttctccatcacctcctcttgcaactggcttaagaacagaagccagccaattttccagctccttctgtatcttccaccatcccagacagagtccaggctcacaatgcctacccaactgaggaagaaatcagagagtcaggatgctcccggtgtctgactgcccttcacaagaccctcatgaacacaaggcagcaagcacatgctataacaacaacggcaaatgctaatgattcacaccacgcgtgtgccacaccctagttgtacgtactcctattccattttacagataaataaaggggcggtgggggcagagggaggaaacaacggctcccttggcactgttatctagtaagtggcagcactgggagccatcctatctgtctgcatctggagctcaaatcgtgatgcctccttcggtggaggaaggctagcttgggatatggaggctactgtgactccggaagacagagaaaagtccaatctcaacaacgtcaccactatccccaatctcagctgactggcatcctctctcctgccagtctgtggacgggaacgcgggcctcacgtgccatctagggtcaaaactcgtctgaggacacacactgggcccaacgcagaggctgatctgttcagcctgtcggctgcaagccaggactctcagcttgtgcagcacccccggaaggaaggtgagccttcctaagcctctactgacagcaaagctgcagaggccctgccgcgtgagacccagaagcttccaagccactt

SEQ ID NO: 479 - DNA, 466 bp, Rattus norvegicus
tcctcctttacagctcgggcaccgtagccatcatgaatgacacggtaaccatccggaccaggaagttcatgacaaaccgtctgcttcagaggaaacagatggtcattgatgtccttcatcctgggaaggccacagtaccaaagacagaaattcgggaaaagctggccaagatgtacaaaaccacaccagatgtcatctttgtatttggattcagaacccactttggtggaggcaagacaactggctttggcatgatctatgattctttagattatgcaaagaagaatgagcctaaacacagacttgcgagacatggcctttatgagaagaaaaagacctcccgcaaacagcgaaaagaacgaaagaacagaatgaagaaggtcagggggactgcaaaggccaatgttggtgctggcaaaaagccaaaggagtagttctacggtgacttgatgttctgctgtgatat

SEQ ID NO: 480 - DNA, 1125 bp, Rattus norvegicus
atgtcgctgccaaaccagtccctagaaggccttcctcaggaggcctccaacagatccctgaatgctacaggggcttgggacccagaggtcctgcaggcactcagaatctccctcgtggtggtcctatccatcattacactggccactgtcctctccaatgccttcgtacttaccaccatcctgctcaccaagaagctccataccccagccaactatctcattggctccttggccaccaccgacctcctggtttctatcttggtcatgcccatcagcatagcctataccaccacccgtacctggaactttggccagatcctgtgtgacatctgggtgtcttctgacatcacatgctgtacggcctccatcctgcatctctgtgtcatcgctctggacagatactgggccatcaccgatgccctggagtacagcaagcgccggaccgcaggtcacgcggcggccatgattgcggccgtctgggccatctccatctgtatctccatcccaccgctcttctggcggcaggccacggctcacgaggagatgtctgactgcctggtgaacacatctcagatttcttacaccatctactcgacctgtggggccttctacatcccatccatcttgctcattatcctgtatggccgcatatacgtggccgcccggagtcgaatcctgaacccaccctccctctacgggaagcgcttcaccacagcacagcttatcacgggctctgcgggctcttcactctgctcgctcaaccccagcctccacgagagccacacgcacacagtcggttcccctctttttttcaaccaggtgaaaatcaagcttgctgatagcatcttagaacgcaagaggatctctgcagcccgagaaaggaaagccactaagacattgggcatcattctgggggcctttatcatctgctggctgcctttctttgtggtatccttggtcctccccatctgcagggactcctgttggatccacccggccctctttgacttcttcacgtggctaggttatttaaactctctcattaaccccgtcatctacactgtgttcaacgaagactttcgacaagcgtttcagagagtcgtccatttccgaaaggcctcttag

SEQ ID NO: 481 - DNA, 1131 bp, Rattus norvegicus
gaattctttacttttctcgctgatcatcattaacatggagagtgcctttggtcctatccccacagcagcccagtttcctgcccctatggttaaaatgactccccaggttgggggacaaaaagagcccctaaaatagtttcaaagaatctacaactgtgaagaactttgttttgccagtcaggattaatgttttcttttccatgggctatagcccactgagacagtttggtaaagggctgttactaaagtcctgaaagccccaggtgaactggttacaattcttttgtcagctgcttagtatttagcacccaggttctaaccatctctccatccttttgttattagttgttactagaagcctagtgtcatttggaggctggttctcttgagagcaaagccaccaagctgacactgaagggaggtaggtactccttaagggaaaatctaagcccagagagacagccggtaacagctaggctgcctctctgctcgcctttctgtttcatagacaaagcttgtgcttatatttacagtggcctttttgtccaaaaaaaggcctcctggtttagctgtgtgactaaatgctatttgtcctcttcagtggacctctctcctctagattcccttcttgttttctcaccatcccacgtgagatgcttgttagtaactgttacaggtcttctttaccaccgaggaaagacagaatcctactagaggcctgaaagaatgttccagacatggctagaaggcccctcacttgtgcctgctctcttcagacgctgaaggtagggagtgccaggtctgcccccaggctccaagggtgggtctcctaggggctggaaaagccccaccaatctggctaagatcaaggaaagggtatgaagagaaagttacagaaatttgaagggttaagctaagttgctgagagttagtataagttacagagaaagtaaggttaaacaaagagaaagagaaaagaaggtaaaaaggcagaagctagggaagaaaagagacaaaaagaagaggaagctagagagctaaagagagataaaagacaagagaggaacatatactggccacagtagttagggaacctaagaagacagttacctggcaacagaagagaattcg

SEQ ID NO: 482 - DNA, 1859 bp, Rattus norvegicus
ggcacgagcggtctcggcgctgtggccatgcctggcggcaccttagcggctgtcctgagcccgacacaaccccggtagaggactccccgggcccggctggcccggccatgcagctagagacgcaggacgcgctgtacgtggcgctggagctggttatcgccgcgctggcagtggcgggcaacgtgctggtgtgcgctgcggtgggagcctcgagtgctttacagacccccaccaactactttctggtgtccctggcgacggcggacgtggctgtgggactcttcgccatcccctttgccatcaccatcagcctgggcttctgcacggactttcacagctgcctcttcctcgcctgcttcgtgctggtgctcacacagagctccatctttagcctcttggcggtggctgtcgaccggtatctggccattcgcgtcccgctcaggtataaaggtttggtcactggaacacgagcaagagggatcatcgctgtcctctgggtccttgcctttggcattggactgactcctttcctgggttggaacagtaaagaccgtgccaccagcaactgcacagaacctggggatggcatcacgaataagagctgctgccctgtgaagtgtctctttgagaacgtagttcccatgagctacatggtttatttcaacttctttgggtgtgtccttcctccactgctcatcatgatggtgatctacatcaaaatcttcatggtggcctgcaagcagcttcagcacatggaactgatggagcactccaggaccacgctgcagcgggagatccacgcggccaagtcactggctatgattgtgggcatctttgctctgtgttggctccccgtgcatgccatcaactgcatcaccctcttccatccagccctggccaaggacaagcccaaatgggtgatgaatgtggccatcctcctgtcacacgccaattcagttgtcaatcccattgtctatgcctacaggaaccgggacttccgctacagtttccacaggatcatctccagatacgttctctgccagacggacaccaagggtgggagcgggcaggccgggggacagtcaactttcagtctgagcttgtgacctaggctctggcctttgggagaagaaggcttaaaataaacaatggactggacacagctggtgacctcactgtggaggacaactaccctctcaagcatgtggcccacctgccctgaacgcttgccaggagtcacacaagtctggctcacacgtacatgcaactaggaggccctgaggctaacagatacacttaggaatctattcagctgctcttacttactgtgtggatggcgggcggctagaactgattccaaaaactgttttatttttaagaatctgcctcattcgtggtagaaaaatgactgaaacttaccttactgtgaaacactgtgaactatataatgtaagtatttttcacttacagcaatgggaaaataaaagttggctctattaacatatactcattccggggacagcaactcagaaaactgaagtataattcttcagtcaagatactgtagtgttaatttagggaatggtactaccctaagtttgaaagtagaattatgtaacaaaacaatttgagttcagtatcttccttgcccacaaaacactagaggtggaaacttggagagctgggtccttcctccactgcacccctgctttagagctaggtactagagtttgcttctctctcacattacagtttattggatcccaaagtatgaaaattttactgagcaaaatcccctagctgtgtattatatccagtgaaataaaactttgaaaggtgaaaaaaaaaaaaaaaaaaaa

SEQ ID NO: 483 - DNA, 1482 bp, Rattus norvegicus
gatcacaggcttggacactccattctttccaactccccacctaaaagtggccttaactacttactagactgattggctggagacctagcccccaagggaggatttggccagggtgatgcctggcccacttagaggacacaagtgcttttgccccttagctgcattgtccaggaaatcaagacgacaaaaggcgtctcccgcgctcgccagggccgtgccacctgcccgctagctcgccgcgctacggtttcccactagccaacatgctgccgagattgggcggccccgcgctgccgctgctcctgccgtcgctgctcttgctgctgctgttgggcgcgggcggttgcggtcctggggtgcgcgccgaggtgctgttccgctgcccaccctgcacgcccgagcgtctggccgcctgcggacccccacccgacgcgccctgcgccgagctggtgcgagagcccggctgcggttgctgctccgtgtgcgcacgacaggagggcgaagcttgcggcgtctacatcccgcgctgcgcccagacgttacgctgttaccccaacccgggctccgagctgcccctgaaggcactggtcaccggcgcgggtacctgtgaaaagagacgcgtgggcgccaccccacagcaggttgcagacagtgaggatgaccactcggagggaggcctggtggagaaccatgtggacggaaccatgaacatgttaggaggcagcagtgctggccggaagccccctaagtcaggcatgaaggaactggctgtgttccgggagaaggtcaacgagcagcaccggcagatgggcaaaggtgccaaacacctcagcctggaggagcccaagaagctgcgcccacctcctgccaggaccccttgccagcaggagctggaccaggtcctggagcgcatctccaccatgcgccttccggatgatcggggtcctctggaacatctctactccctgcatatccccaactgtgacaagcatggcctgtacaacctcaaacagtgcaagatgtctctgaatggacagcgtggggagtgctggtgtgtgaaccccaataccgggaagccaatccagggagctcccaccatccggggagaccccgagtgccatctcttctacaacgagcagcaggagaatgatggggttcacgcccaaagggtgcagtaaaccacagccagtcggtgcctggcttccccaccccaaacaccagcagaaatggagggtgtcagggtgatgggtgtggaggatttcccagttttgacacatgtatttatatttggaaagagaccaacactgagctcagaagcccccctgcgccccccagtggcagttaacctgtacctctgttcctgcttctaatagagagggtggtggcactggggatactgggtacaggcttgggaatggggaaagaaatttttatttttgaacccctgtgtctcttttacttaagattaaaggaaggaaaaat

SEQ ID NO: 484 - DNA, 830 bp, Rattus norvegicus
cgcttgagcagcacagaggggacccaaccctccaaggtcaccagggacacccttctaagaccctccaggaatctgcaatcccattctctacctctggagatcagcatggcggatgagagcagcgatgcggctggggaaccccagccggcgcctgctcctgtccgacgtcgctcctcggccaactaccgagcctatgccaccgagccacatgccaagaaaaagtctaagatctccgcctccagaaaacttcagttgaagactctgatgctgcagattgcgaagcaggagatggagcgtgaggcagaggagcgacgtggagagaagggccgcgttctgagcacgcgttgccagcccttggtgttggatgggctgggctttgaagagcttcaggacctatgccggcagcttcacgctcgtgtggacaaagtggatgaagagagatacgacgtggaagcaaaagtcaccaagaacatcactgagattgcagatctgacccagaagatctatgacctgcgtggcaagtttaagcggcccactctccgaagagtgagaatctcagcagatgccatgatgcaggcactactggggacccgggccaaggaatccttggacctgagggcccacctcaagcaggtgaagaaggaggacattgagaaggaaaaccgggaggtgggagactggcgcaagaatatcgatgcactaagtggaatggaaggccgaaagaaaaagtttgagggctgagcccatggctctcacactgtgctctgaagggcatctctgaggaataaatttctttaaactggaaaaaaaaaaaaaaaaaaaaaaaaaaa

SEQ ID NO: 485 - DNA, 1531 bp, Rattus norvegicus
atgccgttggctgcagtctcattgggtctcctgttgttggccctcctcctgctcttgcgacacctgggctggggcttggtgactattttctggtttgagtacgtgctgcagccagtccacaacctgatcatgggtgacacaaaggagcagcgcatcctgcgctacgtgcagcagaatgcaaagcctggagaccctcagagcgtcctggaggccatcgacacctactgcacacagaaggaatgggccatgaatgtgggtgacgcgaaaggccaaatcatggatgcagtgattcgggagtacagcccctccctggtgctggaactgggagcttactgtggctactcagcagtgcgaatggctcgcctgctgcagcctggagccaggcttctcaccatggagatgaaccctgactacgctgccatcacccagcaaatgctgaactttgcaggcctacaggacaaagtcaccatcctcaatggggcatcccaggatcttatcccccagctgaagaagaagtacgacgtggacacactagacatggtctttcttgaccactggaaagaccgctaccttccagacacacttctcctggagaaatgtggcctgctgcgcaaggggacagtgctcctagctgacaacgtcatcgtcccgggaacccctgacttcctggcgtatgtgagagggagcagcagcttcgagtgcacacactacagctcatacctggagtacatgaaagttgtagacggcttggagaaggcaatctaccagggtccaagtagccctgacaagtcttgatccctcagcctgcccccctgctccccttccagcttctctctgcgagatgacacacattcaatctgaccctttctatgctcctggggcttgtcctcgggggctgtggttccagactgtcatacactggcacattttaaaggtagtgagcccactatgcaaaatcacttcaataaccctgaaaagcacctatggatgaaaggctgaattgaggccaaaggtacactagatcacagcctgcccagcatgcaaaaggcctcaaggttaatcctctgcacccgagcctcatggtctcgctaactagaagaggagatcttcacggggtttcagtgtgggatcactaggcattgtatcaccagttaggcccagcaggaagtcagcaaactgtaaatgtccagacgccaaataacagcagaggctcagagacagtactgtcacttactgtccccagcagctcacaccacatctcatctgaagaatgagtcacaagctttccaggtatggtggtgcacgcctgtcatccccagtatccaggaggcagaggcatcggagttcagcgccagcctggtctacataagtgagttccaagacagccagggctacgtagaaatacatttttaaaaaagttataaccttggggttggggatttagctcagtggtagagcgattgcctagcaagctctaccactgagctaaatccccagccccaacctcttttatattataaaagaaattaaa

SEQ ID NO: 486 - DNA, 3609 bp, Rattus norvegicus
gttcttcagtcgtaccgcgtgcgcaacggtagtgacgcgtttaacccggagtatggcggataccggcttgcgccgcgtggttcccagcgacctttatccccttgtgctcggctttctgcgagataaccagctctcagaggtggccagtaaatttgcaaaagcgacaggcgctacacagcaggacgccaatgcctcttccctcttggacatttatagcttttggctcaagtccaccaaagccccgaaggtgaaactgcagtcaaatggaccagtggccaaaaaggctaagaaagagacttcatccagtgacagcagtgaggacagcagtgaggaagaggacaaagcccaagttcccacacagaaggctgccgcccctgccaagcgagccagtttgcctcagcatgctgggaaagcagcagccaaagcttcagagagcagcagtagtgaagagtccagtgaggaagaggaggagaaggacaaaaagaaaaagcctgtccagcagaaagcagttaagccccaagccaaggcagtcagacctcctccgaagaaggcagagagctctgagtccgagtctgactcaagctcagaggatgaagcaccacagacccagaagccaaaggcagctgctacggcagctaaagccccgactaaagcccagactaaagccccagccaaaccaggtccaccagcgaaagcacagcctaaagcagccaatggcaaagcaggcagcagcagcagcagtagcagcagcagtagcagtgatgactcagaggaagagaagaaggcagctgcacctctcaagaagactgcacctaaaaagcaagtcgtggccaaggcaccagtaaaagtaactgctgcccccacccaaaagagttctagcagtgaggactcttccagtgaagaggaagaggaacagaaaaaacccatgaagaaaaaagcaggtccctacagttcagttccaccaccttctgtttctttatccaaaaagtccgtgggagcccagtctccaaagaaagcggccgcgcaaacacagcctgcagacagcagtgcagacagcagcgaggagtctgattcaagttctgaggaagagaagaaaactccagctaagacagtcgtctccaagacacccgccaaaccagctccagtgaagaaaaaggccgagagctcttcagacagctcagattctgacagttctgaggatgaagctcctgccaagccagtcagtgccaccaagagtcccttaagcaagccagctgtcactcctaagccgcctgctgcaaaggcagtggcaactcctaagcagcctgcgggcagtggccagaaacctcagagcagaaaggctgacagcagctccagcgaggaggagagcagctccagtgaggaagaggccaccaagaaaagtgtgacaacccctaaggccagggtgaccgccaaagcagcaccctctctacctgccaaacaggctcctcgggctggtggagacagcagctccgactcagagagttccagcagtgaggaggagaagaagacgccgcctaaaccccccgctaagaagaaggcagcaggtgcagccgttcccaaacccacccctgtgaagaaagcagcagccgagagcagcagcagcagcagctcctccgaagattccagtgaagaagagaaaaagaagcccaagagcaaagctactcccaaaccacaggcaggaaaggccaatggcgttccagcttctcagaacggaaaagcaggcaaggaaagtgaggaggaagaggaagacacagaacagaacaaaaaggcagccgggaccaagccaggttcaggcaagaaacggaagcacaatgagacagcagatgaagcagcaactcctcaatctaagaaagttaagctgcagacccctaatacgtttccaaaaaggaagaagggagagaaaagggcatcttcccctttccgaagggtcagggaggaggagattgaggtggactctcgagtagcagacaattccttcgatgccaagcgaggtgcagctggagactggggtgagcgagccaatcaggttctgaagttcaccaaaggaaagtccttccggcacgaaaaaacaaagaagaagcgaggcagctaccggggaggctccatctctgtccaggtcaattccgtcaagtttgacagcgagtgacctgtgtcatctttagcaaaggaagggtgactttgggaggctggcactcacctccaatggacccagaaactcagtgttattaggagagagttgtggcacggacagtttgaagcaggttctttgacactgcagtctatagtccttccatgctcctgcttctggacaggtttgtttttgagcgttgattgtcaaagacaaaaagtttttttgtttgttttgttttattttttaagaaatccatttggttgtcagctgccttcctgttctgttggtcttcatactgagaaattgtatattttatattaaatcatgtcatacagatttttgttgtgattttcagagatgagttccacagattaaagtctttgcctaaggcaatgcacagagtcacatggaggattctgtttatgtgagtgcgcagacccacatttgatcccacccctcaaagccccggtgggccctgacataagtcttgtgatgtttgactgctaagcatgccctgtgctcatcttcatccattgggcctgacaccgaagcttcccgaagccggcgtggatctgccaactttggggataaaattgcagttcttggtacaatttcctactgaactgacaggcaggattctcgatgtgagtgcgatgcaacggtttttgttttgttctcagtagctattagtgctacgtgtttacagtgtgttctagttttaatttcgaagtaagcttttctgacactgagaggcatttgcaacaacttgactcttaccgctgttgtatataagctcatgaatatatttgattcttgttaacatcatcaagagcagaatggtaaactcctgcatggttgaggcactggtcaaggaagtggagatgacctacctgagcctctgggtgaagtaggtacggtggatagatcctgggcacctgcagtgaggagcaggcgaaggacagtgaggctgggagaggtctgggcaggaccgttctgtctggatccctcccctcaaagggatcacatgggagtggttatgtcttatttaagttggtcccctggattgattattggtaccttaactatatgatgttactgatacaggctaaccagggggggctgggaggcatatctgggtgatagtggcgcttacctaccattcaaggacagagtgtgatctccatcaaggcaggaagtgaatgagcagagatccctgggccaagggagtaaattataaagccgtaagatttgaccattggcagagctcagccagagtgagggaagggagaagagcaccctggctaacctggtgagaacagacacggagcctccctggtttggtttccatggtcacctggtaacctgctaaaagtgggtgcctgtggcagctccttgaggaagtctgcatggtcaaagttctgtgtcttactacaaaacaataaaatggatggtccctg

SEQ ID NO: 487 - DNA, 2119 bp, Rattus norvegicus
cttatacctcttccccaaccttcccttagttctcgcacctcctttctgctctgtcctctgtccagtgtcttgagattcctgtcccctcccggacctcagtaactcactgcccgtttattcacccagcaggatgtcacagctgagcctctcctggctgggactggggcctgaggtggccttcccatggcagaccctgctactgtttggagcctcctggatcctggcccaaattctgacccagatctacgctgcctataggaactttcgtcgcctccgtggcttccctcagccccccaaacggaactggcttatgggtcatgtgggcatggtcactcctacagagcagggcttgaaggaattgactcggttggtgggtacctacccccaaggctttttgatgtggattgggccaatggtccccgttattactctgtgccactctgacatcgtccgatctatcctcaatgcctcagctgccgttgcgctcaaggatgtgatattctacaccatcctcaagccttggctgggggatgggctcctggtgagtgctggtgacaagtggagccgccaccgccgcatgctgacacctgccttccacttcaacatcctgaaaccctatgtgaagattttcaacgacagcaccaacatcatgcacgccaagtggaaacggttgatttcagaaggcagttcccgtctggacatgtttgagcacgtcagcctcatgactctggacagtctgcagaaatgtgtcttcagctttgacagcaactgccaggagaagtccagtgaatatattgctgccatcctggagctcagtgccctagtggccaaaaggcaccagcagcctttgctgttcatggacctgctgtacaatctcacccctgatgggatgcgcttccataaggcctgcaacctggtgcatgaattcactgatgccgtcatccgggagcggcgccgcaccctcccagatcagggtttggatgagtttctcaagtctaaggccaagtccaagactttggatttcattgatgtgctgctcctgaccaaggatgaagatggaaaggagctgtcggatgaggacatcagagcagaggccgacaccttcatgtttgagggccatgacaccacagccagtgggctctcctggattctatacaacctggcgaagcacccagagtaccaggagcgctgccggcaggaagttcaggagcttctgagggaccgagatcctgaggagattgaatgggacgacctggcccagctgcccttcctgaccatgtgcatcaaggagagtctgcggctgcaccccccagtcacggtcatctcccgatgctgcacccaggacattctgctcccagatggcaggaccattcccaaaggtatcatctgccttatcagtatctttggaattcatcacaacccgtctgtgtggccggaccctgaggtctacaaccccttccgctttgaccctgaaaacatcaaagacagctcacctctggcatttattcccttctcggcggggcccaggaactgcataggtcagactttcgccatgagcgagatgaaggtggcgctggcactaacactgctgcgcttccgactcctaccggacgacaaggaaccgcgcaggcagccagagctgatcctgcgtgccgagggcggactgtggctgcgggtggagccgctgagcgcgggcgcgcagtgacctcacagttggtctggagcacccccaccatcctacctctgaggatcccagaatgaacagaactgtcacccataccagaatcttacggagggccagcagggggcgctgtgaatccagtgagtgggtgagagaggccagttagtgtctgagccaaagacctttgacttcgtctaactgatcgccagcctttatcataaggtgcattcttctccaaccaacctggactattctctggacaataggaagccaaagaaacgtctgagcaagagaccagaatgaaacgcaaatttgagctcttattctcgcagcaaatcccttattcagctccatttccattattttgacctacattcaaatcatctaataaatacattctctcacctcggaaaaaaaaaaaaaaaaaaaaaaaaaaaa

SEQ ID NO: 488 - DNA, 3047 bp, Rattus norvegicus
  misc_feature (1)..(3047): n = a or c or g or t
gtcgacctgcaggtcaacggatcctcaacctgaggcaaccaacagcgctgtgtcgggagccacactgacccagggctttcttagaggtaaatgtaacttttatttgcttgagttaattgtctggaagcttctagcctccgtctgtctgtctgtataatcttatctcagcctagaatgtcttcagcctctgagacttcctgttgaataagctttcgcccttnctagttctttctgatctctggctgnctggttcaactcagctgtttctgctcaaactcctctccagactgactgatccattctggcttctcccagttttctcctgaattgctgtacttggcttcacactaacacgaactctagcaatctgttctaaactattctggttccttctcattctctgactctgatatctctctctctctctctctctctctctctctctctctctctctctctctctctctctctctctctctctcactgtcccagtaaaactatcttcttaactttgttttttctcagcccagctctctcttaagtagcttccctttcttctttcttcttctgacagttagtcatatcctgtgctgtcaactctttctctgattcaccacattgtctgtcactcaattagacgtcactttcaaatccgggtgcttccttctacaaactaactttaccttcattatttgggattaaaggtgggtgctaagcactgagccacaccacaactagaaacaggtatcattgtctagaacagacttggcaaggccaaaccgatgctggaactgctgcttctgaggagtcaccggtgcaaaccccactcttcctcttgggctgtggttattagtcccaatgctgctatgtcgggggtgtccagggttctctttaccgagactgtctgacttagctctctgctcaccttgaccacttcccccttcaaaccacaagtaagattctgtacttcagagagccctgagagccccaccgccgccgccagcctggtcatcgtcacaccccaaggagccgcagccattgctgccggccccagtcactatcaccgcaaccatgagaaacccagcagccgccctcagcccccccccccccgccctcagcgctgccaacaccaagcctggctccacaggcagcaacgcgggtagtggcggccagggcggcctcacatggtcagcgcccgccggcggggacaagaaggtcatcgcaaggaaggttttgggaacaataaatggttcaacgaaaggaacggtttcatcaacaggaatgacaccaaggaagacgtatttgtacaccagactgccgtaaagaagaagaaccccaggaagaaccttcgcagggtaggagatggagagactggggtttgatgttgttgaaggagaaaagggtgcggaggtagcaagtgttacagaccctggtggagttccagttcaaggcggtaaaggcgcagcagaccgtaaccattatagacgctatccaggcaattaccagcacaattacaagaatagtgagagtggggaaaagaacgaggaaggccaggcccaacaacgccagccctatcgcaggtgagggttcccaccttacaacatacagagaccctatgtgcgcatggaccacagtattccaacacccctgtgcaaggagaagtgatagagggtgctgaccaccagggtacaggagaacaaggtagaccagtgagacagaatatgtatcggggttacagaccatggttccgcaggggccctcaaggtagaccagtaagacagaatatgtatcggggttacataccacggttccgcaggggccctcaaggtagaccagtaagacagaatatgtattggggttacagaccatggttccgcaggggccctcctcgccaaagacagcctagagaggatggcaatgaagaggacaaggaaaatcaaggagatgagacccaaggtcagcagccacctcaacgttggtatcgttgcaacttcaattaccgaggcagacacccagagaaccctaaaccacaagatggcaaagagacaaaggcagccgatccaccagtgagaattcgtctgctcccgggactgagcagagtcgggctgagtaaaagccggcttaccatctccaccatcatccggtttggtcatccaacaagactaaatgaatatgaaattccagcagtaagaaatgaacaaagatcagaactgaagaccttaagagcttgctctgtgcccgttgggcagatccactagagctgtctgcagtatctatgagcatggggtcttcttatttttacctaaagatgtctctttttggtaatgacaaatgtggttttttttttcttttttcttttttcttttttttttttcggagctggggaccgaacccagggccttgcgcttgctagactacagagcggaagagacctccaatactgctcacccctgcccacatcctggcccaataggaaattgtatacggcctctgggaactggaagataggggcactggagctgcaggtcccctgcaccccagacaccgccagaacctgaagggaccagatgaacagttctctgcggggttggggatttagcccagtggtagagcgcttgcctagcaagcgcaaggccctgggttcggtcctcagctcaaaaacaaaacaaaacaaaacaaacaaacaaaaaaaaaaaaccaaaaccagttctctgcacccaaatcccatgggagggagagctaaaccttcagagaggcagacacacctgggaagccagaagagactacactctgcctacatttctgactacagaggaaaacaccaaacgccatctgggaccctggtgcacggggggccctccagaaaaggcggcacaggtcctcctggttgctgccctcatggagagtgcataagcaacaccccacgaacaaacttgagcctcgggaccacaggtaagaccaacttttctgctccaagtgacctgcctggtgaactcaggacacaggctcacaggaacagctgatgacctgtagagaggaaaaactac

SEQ ID NO: 489 - DNA, 2563 bp, Rattus norvegicus
cggaacagtctaagggtgttcactttggggactcagtgagtccccctctgttatggagtacagtgtctcttgaatcttacttctggaaatccacggacaagaagactggtgacctatcgattttgtgatgcccacccctggctcctggttccctctctagaggcagaagagccaggcgcagctaatgggacgctttcggagatgctgcgtctgacaggtgcgaagcaacatgtgcaactcctttcttcttcctcccctcagatcctcctccatcttcacccatctttagaggaagagcctacagaaagaagatggctcctgagcaaagagaaggggcctctcaggtgtcagtgacatttgaagatgtggctgtgctctttactcgggacgagtggaagaagctggatctgtctcagagaagcctgtaccgtgaggtgatgctggagaattacagcaacctggcctccatggcaggattcctgtttaccaaaccaaaggtgatctccctgttgcagcaaggagaggatccctggcaggtggagaaagagggccccagatacttctctctcggattgaagtgcagtcatagaaccactaagtcaactcaaacacaagactcttcatttcaggaactgattgtaagaaaatctaaaagaacctttgccttcgaacctttgaacatgaagtcagaaaatcttttcatacatgaaggcaaattagaggaaaagtgggataagaatactttgactgtagaaagaagccataaaaacaatgaatttagcccaaagtcccatagagaaaaacggtcctcagaatgtaaaaagcagatatcttatttatctaacccaccaggaatcacaccggataaacgctataaatgtagcatgtgtgagaaaaccttcattaacacctcatctcttcgcaaacatgagaaaaaccatagtggagagaaattatttaaatgtaaagaatgttcaaaagccttcagccaaagttcagcccttattcaacatcaaataactcacactggagagaagccttacgtatgtaaagaatgtgggaaggccttcactctcagtacgtccctgtataaacatctcagaacccacactgtggagaaatcctacagatgtaaggaatgtggtaaatcctttggccaaaggtcaggtctttttatacaccagaagatccatgcccgagaaaaccctcatagatataacccaggaaggaaggcatccgcttccctctctggatgccagagagctcattccaggaagaagacctacttgtgtaatgaatgtggcaacaccttcaagtctagctcctccctccgttaccatcagagaatccacaccggagagaaacctttcagatgtagcgaatgcggcagagccttcagtcagagcgcatcacttattcagcacgaaagaatccacacgggagaaaagccctacaggtgtggcgagtgtgggaaaggcttcacttctatctcaagactcaatagacaccggataattcatacaggagagaaattgtataattgcaatgagtgtggcaaagccttaagttcccactcaactcttattattcacgaacgaatccacactggagagaaaccgtgtaaatgtaaagtttgtgggaaagccttcagacagagttcagctctgatccaacatcagagaatgcacactggggaaagaccctataaatgtaatgagtgcgggaaaacattcaggtgtaactcatccctaagtaaccaccagcgaatccacactggagagaaaccttatcaatgtatagaatgtgggatgtcgtttggacaaagttctgctcttattcagcaccgaaggattcacacgggagagaaaccgtttaaatgtaacacatgcggaaagacctttaggcagagctcctcacgtatagcacatcagcgaattcatactggggagaaaccctacgaatgtaacacgtgtgggaaacttttcaactataggtcatcccttaccaatcattataaaatccatgtggatgaggacccttaaaaagtaaatttgcatgtaaaaaagccttaaaccaaagctcttcagagaatgggcttgagagctgtaataaacatactatggcgtccctgtagtcatttagttactgtcaactaaattccatggataaatcctgtgtaacaggtaggagtgaaatattcatgcctgtccaacactttaaaaaaattgcttgaaatccggtggttatgtgtagtcctggctaccggggaccctgaggattgcttgactccacaagtttgaagagcaaatgttatggagctttccatctcagaagattagtgacctgaaatgaagaattcacagctgaaggccttgacttcaggtatttggaaaatggtgcttttctctctgcaacagtgtgtgctagatacaattgtaatcataggcatctaagtgaacagaggagtgggatggacttagcaaaacacaaaactctactgttgtgatacttttatactattttaataatatccaaaagggatcaacacaaatcaaaaaaaaaa

SEQ ID NO: 490 - DNA, 2275 bp, Rattus norvegicus
tcccagtcacaatgcctctgttcaaacttacaggtcaaggaaaacaaattgatgatgcaatgcgtagctttgctgaaaaagtatttgcctcagaagtcaaagatgagggaggtcggcacgagatctcccccttcgacgtggatgagatctgcccaatttcccttcgtgagatgcaggcccacatattccacatggagaacctgtccatgtccatggatggcaggaggaaaaggcgcttccaaggacggaagactgttaatttgtccattccgcaaagtgaaacgtcttctaccaaactgtcccacattgaagaatttatttcttcatccccgacctatgagagtgtgcctgacttccagagggtgcagatcactggtgactatgcctctggggtaactgttgaagactttgaggtggtttgtaaaggtctctatcgggctttgtgtatacgagagaaatacatgcagaagtcattccagaggttccccaagaccccctccaagtacctgaggaacatcgacggcgaagctttggtagcaatcgaaagcttctatccagtatttacccctcctccgaagaagggagaagacccctttcgcagagaagaccttcccgcaaacctgggctatcacctcaagatgaagggtggtgtgatttacatctaccctgatgaagcagcagccagcagagatgagcccaagccctacccttacccaaatctggatgacttcctggatgacatgaattttttgcttgctctaattgcacaagggcctgtgaagacttacactcaccgccgtctgaagttcctctcctccaagttccaggtccatcagatgctgaatgagatggacgagctaaaggagctgaagaacaacccccaccgggacttttataactgcaggaaggtggatactcacatccacgcagctgcctgcatgaaccagaagcacctgctgcgctttattaagaaatcttaccatattgatgctgacagagtggtctacagcaccaaagagaagaacctgaccctgaaggaactttttgctcaattaaatatgcatccatatgacctgactgttgactctctggatgttcatgctggacggcagacgttccaacgcttcgataagttcaatgacaaatacaatccggtgggtgcgagtgagcttcgggacctctacctaaaaacagacaactacattaacggagagtattttgccactatcatcaaggaggtgggtgcagacctggtggacgccaagtatcagcatgcggagccccgcttgtccatctacggtcgcagtccagatgagtggagcaaactctcctcttggtttgtcggcaaccgtatttattgccccaacatgacatggatgatccaagtccccaggatctatgatgtgttccgatccaagaatttcctgccacactttggaaagatgctggagaatattttccttccagtgtttgaggccaccatcaacccccagactcatccagacctcagtgtcttcctcaagcatatcactggctttgacagtgtggatgatgagtccaaacacagtggtcacatgttttcctccaagagtcccaaacctgaggagtggacaatggaaaacaacccgtcttacacatattatgcctactacatgtatgcaaacatcatggtgctcaactgcctgagaaaggaacgaggcatgaatacatttttgtttcgcccccattgtggtgaggctggggctctcactcacctcatgacagcctttatgatagcggacaatatttcgcacggcctgaacttaaagaagagtcctgtgttacagtacctatttttcttagcccagatccccattgcaatgtcgccattgagtaacaacagcctgttcctcgaatatgcaaaaaaccctttcttagatttcctccagaaaggcctcatgatctcgctgtcgaccgatgacccgatgcagttccatttcaccaaggagcccctgatggaagagtacgccatcgcagcccaggtcttcaagctgagcacttgtgacatgtgtgaggtggcaaggaacagtgtcctgcagtgtggaatttctcatgaggaaaaagcaaagtttctgggcaacaattaccttgaggaaggtcctgttggaaatgacatccgaaggacaaatgtggctcagattcgcatggcctatcgttatgaaacttggtgttatgaactcaatttgattgctgagggccttaaatcaacagaatgaataaagtatgtgaaccgaaa

SEQ ID NO: 491 - DNA, 1542 bp, Rattus norvegicus
cggtgtgatgtatgcagaagttcgtcccggaaggagaggcaggaagggagtccagagggatggaagagtaccctggggatggaattgtaccagcaggaaagtgggaagctatccttctttgccacaagtgcagagaaaacacagaagaaaagcgagggttggagagatggctcagcagttagcagtggaagcccttgcagtcgccagagtttggttcccagcacctgcatggtggctcacaactgctctaatccagtatctcgggctccttctttatccatcttctctcctccgcaggcatctgcattcgtgcgcacatgcccacagacagcattgtgtgccttaaaaaaaaaaaaaatatttcaagacagtgcttctctgttttagctctgcgtattttggaactacagcggtggcccaggcctttaatctcagcacccaggaggcaaaggtggcaaatctctgtgagtttgaggccgactggtctacagaaatagttccaggacagctggaagtaaaacacaaaaaaccctgtcatatggaaaaaagaaagaaaggaaaagaaaagaaaagaaaagaaaaagaaagaaaggaaggaagaaagaaagaaaagagagaggaaagaaagaaaagagaaaggaaagaaaggaggaaggaaaagaaaagaaagaaaaagggggaaaaaggaaggaggagtgggaatttcctcttctttctgaatccttttcagaggtgcttgggatcccctgagatccagctgaccatgacccgggatgaggccctccctgactctcattctgcacagaatttctatgagaactacgagcccaaggagatcctgggcaggtaagactcggaccacccgggaagtcctgaccgcacctctgctctgatcgctgattggctcaccctctgctctaacgggatttctgacccttagctctccttagaatgagaagggaagtctgtgttacaacccagggccttcgaattctgattgatttaatttctgttttctgagtacaagtgtttcggccgtatgcagtttgtgcgccacatgcgtgtctggtgtccttagaggtcagagtagctgtcggatcccctggatttccagacagttgttagtagccatgtgggtgccgggaactgaacccaggttctctgaaagaacaagtactcagtctctgagctttctctccagtccctttggtaagggagtatggagtatggagtccccaggccctctgttctctgcccacaaggggagtcagcagcgtggtcaggagatgcattcacaaacctacgtgccaagaatacgcagtaaaaatcatcgacatcaccggcggaggaagctttagctccgaggaggtacaggagcttcgggaagccaccctgaaggaggtggacattctgcagaaggtctcaggacaccccaacatcagtaagtgtatcctccaaactccccaactcccctgggcacaaagcagggcagcgtcgtttatagtgaatgattctgccctaataacttacgaagtcagggtg

SEQ ID NO: 492 - DNA, 1388 bp, Rattus norvegicus
gaattcctgtcacttccattcaagagcctacaagaacctaactaggtgcttgggatcccctgagatccagctgaccatgacccgggatgaggccctccctgactctcattctgcacagaatttctatgagaactacgagcccaaggagatcctgggcaggggagtcagcagcgtggtcaggagatgcattcacaaacctacgtgccaagaatacgcagtaaaaatcatcgacatcaccggcggaggaagctttagctccgaggaggtacaggagcttcgggaagccaccctgaaggaggtggacattctgcagaaggtctcaggacaccccaacatcatacagctgaaggacacttacgagaccaacactttcttcttcttggtatttgatctgatgaagagaggggaactctttgactatctcacagagaaggtcaccttgactgagaaggaaaccagaaagatcatgcgggccctgctggaggtggtctgcaccttgcacaaactcaacattgtccatcgggacctgaagccggagaacatccttctggatgacaacatgaacatcaagctcactgacttcgggttttcctgccagctgcagccaggagagaagctccgagaggtttgtgggactcccagttatctggcccccgaaatcatccagtgctccatggacgaaggccatcctggctatggaaaggaggtggacatgtggagcacaggagtcatcatgtatacgctgctggctggctccccgcccttctggcaccggaagcaaatgctaatgttgaggatgatcatggatggcaaataccagttcggctcaccagagtgggatgactactcagataccgtgaaagacttggtatctcgcttcttggtggtgcaaccccaggaccgctgctcggcggaagaggccttggcgcatcctttcttccaggagtacgtggtggaagaggtgcggcacttcagccctcgagggaagttcaaggtcatctgtctaactgtgctggcctcggtaaggatctactaccagtaccgtcgggtgaagccggtaaccagggagatcgtcatccgagacccctacgccctacggccattgcgcagactcatcgacgcctatgctttccgcatctacggccactgggtgaagaaagggcaacagcagaacagagctgccctcttcgagaacacgcccaaggcagtgctcctctccttggctgaggaggaggacttctgaggggtggcggggcacaggggagaaagcaaacagggtacgcgcccccagaactgtgagaagaggatgcctcaaggaggaggcttctgcaaaggagctgtgaccctactctgcactctcaaaggctcgccactagatgcgggaattc

SEQ ID NO: 493 - DNA, 6639 bp, Rattus norvegicus
atggcccgctttggagacgagatgccgggccgctacggcgcaggcggaggaggctcagggccggccgccggggtggtcgtgggcgccgcgggcggccgaggagccgggggcagccggcagggcgggcagcccggagcgcagaggatgtacaagcagtcgatggcgcagagagcgcggaccatggccctctacaaccccatccctgtccgccagaactgcctcacggtcaaccgctccctgttcctcttcagtgaagacaacgtggtgagaaaatacgccaaaaagatcacggaatggcctcccttcgagtacatgatcctggccaccatcattgctaactgcatcgtcctggccctggagcagcacctccctgatgatgacaagacacccatgtccgagcggctggatgacacagaaccctatttcattggcatcttctgttttgaggctggaattaagatcgtggctcttggctttgccttccacaaaggctcctacctgaggaatggctggaacgtcatggactttgtcgtggtgctaacaggcatcttggccactgtcgggacggagtttgatctacggacactgagggcggttcgtgtgctgcggccactcaagctggtgtctggaatcccaagtttacaagtcgtcctgaagtcaatcatgaaggcgatgatccctctgctgcagatcggcctcctcctgttttttgcaatccttatttttgcaatcatagggttagaattttatatgggaaaatttcataccacctgctttgaagaggggacagacgacatccagggtgagtcgccagctccgtgtgggacagaggagcctgcccgcacctgccccaacgggaccaaatgtcagccgtactgggaagggcccaacaacggcatcactcagttcgacaacatcctgtttgctgtgctcactgttttccagtgcatcaccatggaaggctggactgatctcctctacaatagcaacgatgcctcagggaacacttggaactggttgtacttcatccccctcatcatcatcggctccttttttatgctgaaccttgtgctgggtgtgctgtctggggagtttgccaaagaaagggaacgtgtagagaaccgaagggcttttctgaagctcagaagacaacagcagattgaacgtgagctcaatggatacatggagtggatctcgaaagcagaagaggtgatcctcgcggaggacgagacagacgtggagcagaggcacccttttgatggagctcttcggagagctactctgaagaaaagcaagacggacctgctcaaccctgaggaggcggaggaccagcttgctgacatcgcgtctgtggggtctcccttcgccagagccagcatcaaaagtgccaagctggagaattcgacttttttccacaaaaaggagagaagaatgcgtttctacatccgccgcatggtcaaaactcaggccttctactggaccgtgctcagtctggtagccctcaacacgctgtggctcgccattgtccactacaaccagcccgagtggctctccgacttcctctactatgcagaattcattttcttaggactctttatgtccgaaatgtttataaaaatgtatgggctcgggacacggccttacttccactcttccttcaactgctttgactgtggggtcatcatcgggagcatctttgaagtcatctgggccgtcatcaaaccgggtacatcctttggaatcagcgtgttacgagctctcaggttactgcgtattttcaaagtcacaaagtactgggcatctctcagaaacctggttgtctccctcctcaactccatgaaatccatcataagtctgctgttcctcctcttcctcttcattgtcgtctttgccctcttggggatgcagctgtttggtggccagtttaattttgacgaggggactcctcccaccaacttcgacacttttccagcagcaataatgactgtgtttcagatcctgactggcgaggattggaatgaggtcatgtatgatgagatcaagtctcaggggggcgtgcagggcggcatggtgttctccatctacttcatcgtcctcaccctcttcgggaactacaccctgctgaacgtgttcttagctatcgcggtggacaacctggccaacgcccaggaactcaccaaggatgaacaagaagaggaagaggcagccaatcagaaactggctctacagaaagccaaggaggtggcagaagtgagtcccctgtctgcagccaacatgtccatagctgtgaaggaacagcagaagaaccagaagcctgccaagtcggtgtgggagcagcgcaccagcgagatgcgcaagcagaacctgctggctagccgcgaggcgctgtacggggacgcggctgagcgctggcccaccacttacgcgcgcccgctgcggccggacgtgaagacgcacttggaccggccgctcgtggtggacccgcaggagaaccgtaacaacaacaccaacaagagccgtgcgccagaagcgctgcgccaaaccgcgcggccccgcgagagcgcgcgcgaccccgacgcgcggcgcgcctggcccagcagccctgagcgcgcccctggacgagagggcccgtatggccgcgagagcgagccgcaacagcgcgagcacgcgccaccccgcgagcacgtaccctgggacgcggatcctgagcgcgccaaggccggggacgcgccccgccgccacacgcaccggcctgtggccgagggcgagcctcgtcgccaccgcgcgcgccgccggcccggggacgaaccggacgacagaccggagcgcaggccgcgtccccgcgacgccactaggccggcccgcgctgcagacggcgaaggcgatgatggggagcgcaagcggcgacaccgacacgggccgccggcccacgatgacagggagcgcagacaccggcgcagaaaagagagccagggctctggggtccccatgtctggtcccaacctgtccaccaccaggccaatccagcaggatctgggccgccaggacctgccactggctgaggacctggacaacatgaagaacaacaagttggccaccggggagcctgccagtccccacgacagcctgggccacagtggccttccccctagccctgccaagatcgggaacagcaccaaccctggtcccgccttggccaccaatccccagaatgctgccagccgcaggacgcccaacaacccgggcaacccgtccaaccccggcccccccaagactcccgagaacagccttatcgtcaccaaccccagcagcacccagcccaactcagcaaagactgccaggaaacccgagcacatggcggtggagatccccccggcctgcccgcccctcaaccacactgtggtccaagtaaacaaaaacgccaacccagacccactgccaaagaaagaggaagagaagaaggaggaagaggaggcagaccccggggaggatggcccaaagcccatgccgccctacagctccatgttcatcctctccaccaccaacccccttcgccggctgtgccattacatcctgaacctgcgctacttcgagatgtgcatcctcatggtcattgccatgagtagcatcgcgctggccgccgaggacccggtgcagcccaacgcaccccgcaacaacgtgctgcgatattttgactatgttttcacaggagtgtttacctttgagatggtgatcaagatgatcgacctgggcctcgtcctgcatcagggggcctatttccgtgacctgtggaacattctggacttcatagtggtcagtggggccctggtggcctttgccttcactggcaatagcaaaggaaaggacatcaacaccatcaagtccctccgagtcctccgggtgctacgacctctaaagaccatcaagcggctgcctaagttgaaggccgtatttgactgcgtggtgaactcgctcaagaacgtcttcaacatcctcattgtctacatgctcttcatgttcatcttcgccgtggtggccgtgcagctcttcaagggcaaattcttccactgcacggacgagtccaaggagtttgagagagactgtcgaggcaaatacctcctttacgagaagaacgaggtaaaggcgcgggaccgcgagtggaagaaatacgacttccactacgacaacgtgctctgggccctgctcacgctctttacggtgtccacgggagagggctggccacaggtcctcaagcactcagtggatgccacttttgagaaccagggccccagccccgggtaccgcatggaaatgtccatcttctacgtggtctactttgtggtgtttcccttcttctttgtcaatatctttgtggccttgatcatcatcaccttccaggagcagggagacaagatgatggaagaatacagcctagagaaaaatgagagggcctgcatcgactttgccatcagtgccaagccgctgaccaggcacatgccccagaacaagcagagcttccagtatcgaatgtggcagttcgtggtgtccccaccctttgagtacaccatcatggccatgatcgctctcaacaccatcgtgctaatgatgaagttctatggagcctctgtggcctatgaaaacgcccttcgagtgttcaacattgtcttcacctccctcttctctctcgaatgtgtgctcaaagtcatggcttttgggattctgaattatttccgcgatgcctggaacatcttcgactttgtgactgttctgggcagcatcacagacatcctcgtcaccgagtttgggaataacttcatcaacctgagctttctccgcctcttccgtgctgcccgactcatcaaactcctccgccagggttacaccatccgcattctcctctggactttcgtgcagtctttcaaggccctaccttatgtctgtctgctgatcgccatgctcttcttcatctatgccatcatcgggatgcaggtgtttggcaacatcggcattgatggggaagatgaggacagcgatgaggatgagttccaaatcacggagcacaataacttccggaccttcttccaagctctcatgcttctcttccggagcgccacaggggaagcgtggcacaacatcatgctgtcctgcctcagcgggaagccatgcgacaagaactccgggatccaaaaaccagagtgtggcaacgagttcgcctatttttactttgtctcgttcatcttcctttgctcatttctgatgctgaatctctttgttgctgtcatcatggacaacttcgagtacctcacccgagattcctccatcctgggcccccaccacctggatgagtacgtgcgtgtctgggcagagtatgaccctgctgcctgcggccgcattcactataaggacatgtacagtttattgcgagtaatatcgccccctctcggcttaggcaagaaatgtcctcatagggttgcttgcaagaggctcttgcggatggacctacccgtagcggatgacaacaccgttcacttcaactccaccttgatggctctgatccgaaccgccctggatatcaaaatcgcaaagggtggagctgacaagcagcaaatggacgcagagctccgcaaggaaatgatggccatttggcccaacctgtctcagaagaccttggatctgctggtcacacctcacaagtccacggacctgacagtgggtaagatctacgcagccatgatgatcatggagtactaccggcagagcaaggccaagaagctgcaggccatgcgagaggagcagaaccggacaccactcatgttccagcgcatggagcctccatcgccaacacaggagggaggacccagccaaaacgcccttccctccactcagctggaccccggaggaggcctgatggctcaagaaagcagcatgaaggagagcccgtcctgggtgacccagcgggcacaggagatgttccagaagactggtacctggagcccagagcgagggccacccatcgacatgcctaacagccagcccaactcccagtctgtggagatgagagaaatgggaactgatggctactcagacagcgaacactacctccccatggaaggacagaccagggccgcctccatgccccgcctcccagcagagaaccagaggagaaggggccggccacgtggaaataacctcagtaccatctctgataccagccccatgaagcgctcagcctccgtgctgggacccaaagcccggcgactggatgactactcactagagcgggtaccacctgaggagaaccaaaggtaccaccaacgccgccgggaccgtggccaccgcacctctgagcgctctctgggccgatacactgatgtggacacaggcctggggacagatctgagcatgaccacccaatcgggtgacctgccctccaaagatcgggaccaggaccggggccggcccaaggaccggaagcatcggccacaccaccaccaccaccatcatcaccatcatcccccggccccggaccgggagcgctacgcacaggagcggccggacaccggccgggcgcgggcccgggagcagcgctggtcccgctcgcccagcgagggtcgggagcacgcgacacacagacagtag

SEQ ID NO: 494 - DNA, 301 bp, Rattus norvegicus
aaaccccgagtttatttaaccattttggaggtttaagagcatggtaccagcaattgtttccctccaatcggcatctcctagctacatcacagtgtggtgaaatggtggttaaccctcattgtcatcttgactgcatctggactcacataggaggcacctctgggagtatgtgggagggtactgccagagaggcttaacaggatggcagacatttctgaatatgggcagcagcaaaccatcagctgtggtcctgagctgtgccttgtgctggagggcaggtctgtaggtagcatgatggtcg

SEQ ID NO: 495 - DNA, 328 bp, Rattus norvegicus
atgtgttgtgtacagtcgcacagaaattgttttattcaggtgagaagaaaacaggtgggagaactcagaatacaaaagaacgaacatctcgtcctcctccagccttgagactttctggaatatccgtgaggtctccaaagttcccctggcaagttacacaggcacaagattgttttctttgagtgccgggatgcggtgaacaaacatacaaagtgagaattcttgcttcagtgaatattaaataaacaataatgctacagctgggacccatctgagtgaaggcgtacgacagaacgccaactgaaagttcaaagtctggtcatgaatt

SEQ ID NO: 496 - DNA, 637 bp, Rattus norvegicus
agctgtaaaaacaacatttattactttataatattgagaatgagtatttgggccaaaacaatgggaatgccatacaaataattttttcatcttatatttcaaaacctactacagatattacactgttttttaattgattcacctgtatttgatttgggaaaaatacattgggcaggggacacaaaatatcacacaatagcactaggaaatgtctggaaaataaggggagttgtggattaggatcatgttagctctcatacaggacatatttcagttatgataaaggaagaattgaagcaatcgctggatcccagcaacattccttcagcatctcatctactcctactttctctcaaataatctaagatctctggccttctgttcataaatactccttgactctgtttttgatgagattacttctgaacgcagttttctttctcttcaaaggaccaagacttgagtgtcacactgctgagaattgtcccaggttgtgtccaatatcctcctagcactctccattgtgaatcgtatcaagtagaaaccacctattcccatgtttgctctccacaactcaagtccagaaagtctcaggtacatgcattctgtggcagagaccagctccttgcttgctcaa

SEQ ID NO: 497 - DNA, 1550 bp, Rattus norvegicus
ggagaaaaggcgtgggggaagcgccgtcccgggctacaggagtcagaggtagtgtttccttccggtctgaactcaccgccccttccctgccccgccccctcccgcctgggggcttccaagcgcctcctattctgaagtgagcccctgccgcggtcatgaagcttgtgaggaaagatatcgagaaggacaatgcgggccaggtcaccctcgtcccggaggagcccgaggacatgtggcacacctacaatctagtgcaggtgggcgacagcctgcgcgcctccaccatccgtaaggtccagaccgagtcctccacaggcagcgtggggagcaaccgtgtccgcaccaccctcactctttgcgtggaggccatcgacttcgactcccaggcctgccagctgcgggttaagggcaccaatattcaagagaatgagtatgtcaagatgggggcttaccacaccatcgaactggagcccaaccgccagttcaccctggccaagaaacagtgggacagtgtggttctggaacgcatcgagcaggcatgtgacccggcctggagcgctgatgtggcagctgtggtcatgcaggagggcctcgcccatgtctgcttagtcacgcccagcatgacccttacccgtgccaaggtggaggtgaacatccccaggaaacggaaaggcaactgttcccagcatgaccgggccttggagcggttctatgaacaagtggtccaggccatccagcgccacataaactttgaggttgtaaagtgcattctggtggccagccctggatttgtgcgagagcagttctgcgattacatgtttcaacaagctgtgaagaccgacaacaaggtgctcctggaaaaccgctccaaattccttcaggtacacgcctcctctggacacaagtactccctgaaagaggtcctatgtgatcctactgtagcgagccgcctttcagacacgaaagctgccggggaagtaaaagccttggatgacttctacaaaatgttacagcacgaacctgaccgagcattctatggactcaagcaggtggagagggccaatgaagccttggcgattgacaccttgctcatcagtgatgagctcttccggcatcaggatgtggccacccggagccggtatgtcaggctggtggacagtgtgaaagagaatgcgggcaccgtaaggatattctccagtctccacgtgtctggggaacagcttggtcagctgactggagtagctgccattctccgcttccctgtgccggaactttctgaccaagaggatgattcaagttctgaagaggattaagacggaaactcaatagtttcttcttctacagcatccttgacaagtgcaaggccgcacttgttggtcctgctggggtttcatgtgtgatgggttcccatgaagtgttttatggtttggttggcaggacatgtattccaattaaataaaccacaacgatgtccaagcaaaaaaaaaaaaaaaaaaaaaaaaaaaaaaaaaaaaaaaaaaaaaaaaaaaaaaaaaaaaaaaaaaaaaaaa

SEQ ID NO: 498 - DNA, 1286 bp, Rattus norvegicus
gtgaccagcaccatgtccagccaggtggtgggcatcgagcctctctacatcaaggcagagccagccagccctgacagtccaaagggttcctcagagactgagactgaacccccggtgaccctggcctctggtccagctccagcccgctgccttccagggcacaaggaggaggaggatggggagggggcagggtctggtgagcagggcagtgggaagctagtgctcagctctctacccaaacgcctctgcctggtctgtggggatgtggcctctggctaccactacggtgtggcatcctgtgaggcctgcaaagccttcttcaagaggaccatccaggggagcatcgagtacagctgtccggcctccaatgagtgtgagatcaccaagcggagacgcaaggcctgtcaggcctgccgcttcaccaagtgcctgcgggtgggcatgctcaaggagggtgtgcgtctggaccgagtccgcggtggccgacagaagtacaagcggcggccagaggtggacccattgcctttcccaggccccttccctgctggtcctctggcagtagctggaggaccccggaagacagccccagttaacgccctggtgtctcatctgctggtggttgaacctgagaagctgtacgccatgcctgacccagcaagccctgatggacacctccctgctgtggccactctctgtgatctgtttgatagagagatagtggtcaccatcagctgggccaagagcatcccaggcttctcctcactgtcactctctgaccagatgtcagtactgcagagtgtgtggatggaggtgctggtgctgggtgtggcccagcgctcactgccactgcaggatgagctggcctttgctgaggacctggtcctggatgaagagggggcacgggctgctggtctgggggatctgggggcagccctgctgcagctggttcggcggctgcaagccctacggctggagcgggaggagtacgtcctgctgaaagctctggcccttgccaactctgactccgtgcacattgaagatgctgaggctgtggagcagctgcgcgaagccctgcacgaggccctgctggagtatgaagctggccgggctggccctggagggggtgctgagcggaggcgcgcaggcaggctgctgcttacgctgccactcctccgccagacagcaggcaaagtcctggcccatttctatggggtgaagctggagggcaaagtgcatgcacaagtgtttttggaaatgcttgaggccatgatggactgaggcaaggg

SEQ ID NO: 499 - DNA, 459 bp, Rattus norvegicus
gggtgtccttgtagttcgcgccaagggagccttgttatggccgcctgctaggagagtgtagcctgctgaaacggtccgcagctctgtggacgcaaggcagagtggacctcagaacttacaacttcagaccagcgctgttttcccacctatccgaacagagcaacgagggcttcgtagcgtcggttaaaaaaaacaaaaaacaaaaaaacacctgaagacgcgatttaccgcggtggtttgcaccttccgacacctcacctcggaacccaggagctgcgctaactcttactgtaggtagccgaggtgcccacggtccgattaagcacgaggtgttggagcacgtggccatctgagccctcggacttttctcctttgggtctgcatggatacagccccatattttgctactgggttaaaaagacgtcagatctttctggaacttgaccacagctgccattt

SEQ ID NO: 500 - DNA, 649 bp, Rattus norvegicus
  misc_feature (1)..(649): n = a or c or g or t
actgaggatctcataatgctaggtgaaagtagcagagttccttttcacttttacaccagtgccaaagaccttttataaagaggttcattctactgaactagcctccactgattcttgggttaatcatcaggcacaattcttgcatatgctttttcacatacagcatagtgatataagccattaaacactccaatattatctgaaacaacagaggaacggccattgctttcatcccagtttgacaaaggagtaaccaatggagcataactcttccctttggcggcactggaacagtgtgatacttaactgctaagcgtccatttttataaaaagccaaagcactgggataggagaccccacaggctacgccgatcagtgagcttctcagaacacagctttcctggcttatattacctgattgcagagcatcagtcacaaagagcttgtaagtaacggcggtagccacaaatggaagggtantcagggatgcataggtcctcaaagcttcatacntaaccttgaaactgtatctgaatactagtttgcccatacgcagacaactactactaatcaanngataagttcacgtanatttaaatctggtcgttnantagatcaaacttctctcaaagattcaacgatatgggct

SEQ ID NO: 501 - DNA, 656 bp, Rattus norvegicus
  misc_feature (1)..(656): n = a or c or g or t
catggctgagcgtttattgcagtgctaacagagggtgctgggggcctgccctgctttcaccctctttacatccccctccttccggtctccaagcatccttccggagcattctacatccttccttctcctactccatcgctgtaaccgcacaggcgtgttccagggcctctcacggggcctctggctctcaacagaatctcttgtcccttcttctggggctgagggtactcagctctccactcctagtgtccaccatccttgttcccctccctgtggggacccaggacacctaggcatcctggcctctggctccctcctcccatggcccgcacctctgggcaaactacaaagcagccttggccagcagctctcccccatcgtcctaggcaggaagtgcccagcccaaggcagacacatcagagtctgcatcggtcgcagtcatctcagcctctctgagcttcctgagacatggaccgagacagggtacgccgcangggcccaagtttgctgactggcacaccggnggaagctgcttggtgatctcagccacgtcctggcgctccacgcactggccgcccanggctgtcttcagggcagcagctccgcagctgaatggggtctctcgcgtcctcctgntggnncccactggtaggggg

SEQ ID NO: 502 - DNA, 943 bp, Rattus norvegicus
gaaccccgccccatcccgctgctccgttcctccgctgtgcatgcgagggacgtcaggggcggcgccgcagcagttacccctggtaacgggggaggcaggaggaggaggcggaggaggaggaggagggactcggcttgaggatgggcttgctctctattttgcgcaaattgaaaagtgcaccagaccaggaggtgcgaatcctcctcctgggcttggacaacgctggcaagacgaccctgctgaagcagcttgcatctgaagacatcagccacatcacacctacacagggatttaacatcaaaagtgtacagtcacaaggttttaaactgaatgtatgggacattggcggacagaggaaaatcagaccatactggagaagctattttgaaaacactgatattcttatatacgtaattgacagtgcagacagaaaaagatttgaagagacgggtcaggagctaacggaattgctggaggaagaaaagctgagctgtgtgccagtgctcgtctttgctaacaagcaggatctgctcacggcggccccagccgcagagatcgcagaagggctaaacctacacaccattcgggaccgcgtctggcagatccagtcctgctcagcgctcacaggcgagggcgtccaggacggcatgaactgggtctgcaagaatgtcaacgcaaagaagaagtaagatgccgagggaggcgcggagctgcgggagctggtcccgccctgagaaagaaacactggcttgcgctttctgaccaaaggctttcccatctgcacggccacagctgtgtggtgggaggggacagcagcttaagaggaacccccattccagcagtagattttaactgatctcagaggttcagtatcgtttttcaaataaaggaattatattgtttcctctgcaaaaaaaaaaaaaaaaaaaaaaaaaaaaaaaaa

SEQ ID NO: 503 - DNA, 681 bp, Rattus norvegicus
gggatcagagtttctttatgggctataggggccacaaggctggccaggtggcaaggtcaccggtggcccggtcaccgatacaggtagtcagcctggatgttggccgcgatctcggcctcccacttgtcaccattgttgagtagcttctccttgttgtacagcaactcctcatgcgtctcggtggaaaactcaaagttggggccctccacgatagcgtcaacagggcaggcttcctggcagaaaccacagtacatacacttggtcatgtcaatgtcatagcgtgtagtccggcggctgccatctgctcttggctcagcctcaatggtgatggcctgtgcaggacagatggcctcacagagcttgcaggcgatgcaacgctcctccccagtacggtatcggcgcagtgcatgctccccacggaagcgcggactcagtgggcccttctcaaaggggtacttgatggtggccggctcccgaaatgagtacctacggtcatgcccagtctcggaagagtccgtcacatcagaaccgaactgcatgtcatcccagattctagtcaaaaaattcggtgccttcaatcaatactgttcgtacggccatgaagctagaggtttgcaataaaatccgtccaggccggcaaggcgggaaaatcaaccaggggaatctaataacccccgcaat

SEQ ID NO: 504 - DNA, 512 bp, Rattus norvegicus
aagaagcaaaggcgaggtttattacggagacctattacagagatctccgggccggcacatatcccgcgcaggagacaaaggtgtcggccccgaaactcaaaagtcagagggttatataaagaaggctaaggggttttggcgtggttacatacaattggctcattcaaacatagcagtgagaacaaagcaccattagtacgctgctataagtcaggggcttatcaagggccggaggatggccctcattgacctggggggagatgtcttcctgccacacttcccatgaatcagtcccattaactcaggctggttcctgcattccttttctttatggcttgtcagtagctccttgcactcaaagtttttggataatggcccactggggggcatacgagcacagtacattgggtccctgtccagcactctagcacaaacaacctctccaatggccctcggggtctttcatgggcaatgtctgacccaatggccttttccctccacgtgccgaattc

SEQ ID NO: 505 - DNA, 654 bp, Rattus norvegicus
acaaaggattttaattcattccacttaaaaaataaaggtagtctcctcaccccccataatgagtacattaagcacatattcacatacagaaaatgtacgtacattcaattgtttacaagatttgtcaccatgtaatccattgacattcaagtgaagtagatgaacttatctacatgtatatatttggaacttctgtaccccatccatccctttttaaacaaccaagataatacgtctattctctagaagtcagttcatagaggatgatttaaggttagaagtctcttttgaagaattacaatgaagtatttatacaataagggctcagaacttctaaacacaagcttgaagctacagctcactaccttaagttacatcacatccagtgtctgggatttttttttagcaggctgtttagtttgtaagccatttcaaatgtttcaaacaattacttgtgcatcaaggagaaaaagtacaaagagaatgattccttccttttttttttatattagataaaataacatatcatctaatccttctcaaatccaacattgtaacacattactacgcaatgttcaacttgagtttctgggaatcaagatcactaactagatgaaaacagaatttcatggtaccaaacaaagccgcctttaa

SEQ ID NO: 506 - DNA, 561 bp, Rattus norvegicus
atttctgctccttccacgactgcaaactttccagggttgggctggcaaaaaggcggcttcgctgaggactgtttactgctctggatttaccaatggtgtgatcatcattaagaaacaaaaggcaaaaacacagtcaaatcaaacaaaaggcaaaatagctcaccagccattccaaccgacagagaaaataccaccgagttaacgtaggtgtttggcttgaaccggctagggctttttgtccagttttaatctaattttcagtgacggctttcagtttttttatacaaaaggtcttcctttctttcaccctccaccaccccacacccaagtcgagaaaaacagctgtttttcttcaaatagatcgattttcaaagaaagtgttaagagctactgggaagaaatctgaatagcaactattgctgtaaacattttttcccccagaaagctggagctaaaaaaatcgaattttataaaagcaaagtctaaaaacattttactgacttacacaggcaggacaaagacacacatcacattaagtccgaaatcattcatccagggaca

SEQ ID NO: 507 - DNA, 628 bp, Rattus norvegicus
gcgagacaagagagagcaggacaccatcgcagctgcctggcccatcacttctgcagcatggatctccagaaggtgctgccccagatgattctgctcctgcttttccttaatctgtcgccgctgggaggtcactcccatcccctgggaagtcctagccagtctccagaacaatccacgatgcagaagctgctggagctgataagagaaaagtcagaggaaatggctcagagacagctctcaaaggaccaaggccctacaaaagaacttctaaaaagagtccttaggtctcaagacagcgccttccggatccaggagagacttcgaaattccaagatggcacatagttcaagctgctttgggcagaagatagaccggatcggcgcagtcagtcgcttgggctgtgacgggctgaggttgttttaggaagacctcctggctgcagactccggcttctgactctgcctgcggctcttctttccccagctctgggaccacctctcaagtgatcctgtttatttatttgtttatttatttatttttatgttgctgattttctacaagactgtttcttatcttccagcacaaacttgccacagtgtaataaacatagcctatttcttgcttttgg

SEQ ID NO: 508 - DNA, 524 bp, Rattus norvegicus
  misc_feature (1)..(524): n = a or c or g or t
aatgttaccactccaactatttgccaacagtaacactggtatattttgtcaatgtacaatacagagagcacagcccctcatgactggtgccaggtcacatgcagcacagttcctcttccctgtcagacagtgtctttaactaaggacagacagtacgtggagcgtaagcaagggattcgggcactgtgaagcgggcagctcctcgccagctggccccagtcagatacactatggtggtcagttctttctgtgcagatgacaagggaaagatgaaccatgctgacagaggatggggcaggcgggtcgagccactgtgagtcagaaggctgacctccacgttgcaggatttgctctctgcanggatacagagtgctcagtttgcagatctgctggtacgtgacctcgatgatgacgacatgaatgggagggagatgggtgacccaagcaggccagcagagtgatgatgggccagagagggctcctgatctctcttgtggttgggcaggccccggtggctcatgagg

SEQ ID NO: 509 - DNA, 505 bp, Rattus norvegicus
  misc_feature (1)..(505): n = a or c or g or t
cctgagactgaatgagtttatcagatccttcctggggaaggttttttctgggtgagagaataggcatggggtaagacaaaagggcactgagctcccgatcagggcagcaggatggtggggaacacagcacaagcagcggatgtagcacatgggctgctcctttccagtctggcttgaaaaagcctcagggagccatcaacaggtctaggacatagtgtggagatgtcacaggcacactgagtgcctgccgggagcaggcaagacataactctggagtttgcaaaataatgcggcttgatgctggaagtgagcagggcaaagggaggcagtccctagggaggcagtccctaaggaggacatggagactccattagctgatgcgccagggctgtgctttggggccttctgggttcaggatattttgtatctgcagcgggacagaaaataccagagcacatctgcccacagtctgngctggagagggctggaggagtgcattcatgtt

SEQ ID NO: 510 - DNA, 584 bp, Rattus norvegicus
gaaggcattttgtaaaactgttaggccacaggccccaagcgattgtatgaaaacaatccgcctcacccagtgagaacaatggctctgagaagggcagacttttctgtacttgcagagggctctcagttggggggggactgggggggggatcaagtcagaagaaatgatttgcatcaggcaacttaaaatacatataatccattatattaaaaggtagctagctgccaacaactgtcacaggtagacaaggaatcctacctttgtttaaaacaagcttaaaaattaattgattttcttatttttagaaagggaataaaggctttgatgctaaaaatcttgagaaagtaaagacttagaagaacttttctcataagcaagcgctaatgacttaaaaaaaaaaacctttcctttggagttttcttcattaatgactagtgtgtgcaaattaacacgtaatgacccaatatttgtgctatttctcactatatttgtctcaatcccaagatagcatgcagttcaaattttttagcatatatgaaagcctttacaataaacatatttagatcaagtatttcagattattg

SEQ ID NO: 511 - DNA, 595 bp, Rattus norvegicus
  misc_feature (1)..(595): n = a or c or g or t
gcccattacaaaagtctttattcgctggcaggtgcattcatgtaacacacatccctagttctcaaggtcacactcaactggattggcccttcagcagcacagccacgtagtgtcctgataggacacaggagagcccaagatcttttcctcaaatacaagtctcagtctcttcaacaatccattagaaatcatggctcttggaaaagagttttgcacagccatgcaggagaggcccagcatttgtactgcatccatgggcgggcaggccagtgggtggtcttgccttgtgggatggctcaatattagtacttgcgggttanattgtcaggagggtttaggtgaggaccaagggctcagctcccagggctccccagtaggaaccattctccccttgctgacactgcttccttgcgcacaagtctcttcttgtcatccagaggcttggctaaagctcggatcacctgagatttgaatggcagcaacacagaagtggggtaccgagtgagagcatgcatacactgcagagcagcaatccggacggccattgaatgactggaactgaaggtcaggagtttcgtgccaagttatcacatga

SEQ ID NO: 512 - DNA, 571 bp, Rattus norvegicus
aagcaaaagtagatgagggtggatcaggttaagtaatattggttaaaagaaagagaaaaaagacaccaaaagttatttccttcctaaggtctcagatagtttcttaagtcttttcttcagctccaaaggaaatttctcgtagcacttcttacagactggtttcatgtcaaactccacaaatttattccacagagaagcagtgagaatggtgtggaagggatagaacggttacagacacactggctttctctttctctgcttctctttatcccttgcttctctctcccgtctggcaagtcgcctcttaagctcttctggcattttctcataacagtatttgcagactggctttagatcaattgcaacaaacttatccttgagtgttagtttggtattgcaagtggaacaggcaaagcagctcacacaccaagccttgttgagggcagagaccacgtcaccttctatgacacggttgcaatggaaacaaacatcaccaaatagctgattatagtgagtctcacaataggccaagcccttcctctcataatggcgatgtccaagaaatgggttt

SEQ ID NO: 513 - DNA, 2169 bp, Rattus norvegicus
aattcgtcccgtttctgaggcgacgcctcagccggcagttagccatcgcgcagggacccgctcggagcggtgggtctcggccccagcgacaccatgggggccgtccttggcgtcttctccctcgctagctgggttccatgcctatgtagtggtgcatcatgtctgctgtgcagttgctgccccatgagtaagaattccactgtaactcggctcatctacgcttctattctcatccttggcactattgtgtcttgcatcatgatgacagaaggcatacaaactcagctgaagaagattcctggattctgtgaaggagaatttcaaatcaagatagttgatacaaaggcagagaaagactgtgacgtgctggtcggttttaaagctgtgtatcggatcaactttgctgtggccatctttttctttgccttctttttgctcatgttaaaagtgaaaacgagtaaagatcccagagcagcagtacacaatgggttttggttcttcaaaatcgcggccattattggtatcatggttggatctttctacatacctgggggccatttcactaaagtttggtttagtgctggaatgttaggagccactttcttcattttcatccagctggtgctcttggtagacctggctcactcttggaatgaattatgggtaaatcgaatggaggaaggaaacccaaggctctggtatgctgccttgctgtcgtttacaagcctcttctatatcctgtctatcgtctttgccgcactgctctacatcttctacactaagcctgacggctgcacagagaacaaggtcttcatcagcctgaacctcatcttctgtgttgcagtttctattgtgtccatcctccccaaagttcaggaacatcagcctcgctctggcctcctacagtcctccatcatcactctgtacaccctttacctcacgtggtcggccatgaccaatgaacctgatcggtcctgcaacccctccctcatgagcatcatcacacaactcacctcccccactgtgtctccagcaaattcgaccactcctgctcctgcctatgtccccccatcccagaatggacacttcataaatttggatgatttggggggactgactatctttgttatctgccttatatattctagcatccgtacttcgagcaacagccaagtgaacaagctgaccctctctgggagcgacagtgttatccttggtgacaccaccaatggagccagcgatgaagaagatggacggccacggcgggctgtagacaacgagaaggacggggtgcagtataactactccttcttccacctgatgctctgctgtgcctccctgtacatcatgatgaccataaccagctggtacagccctgatgccaaattccagaaggtgtccagcgagcggctagctgtgtgggtcaaaatgggctccagctgggtgtgcctcctcctttacctctggactcttgtggctcccctggtcctcacaggtcgggacttcagctgagctcagtgtatggaggatactactaaagctgacagagttcctctcctggaaatgcatatccattttacatttcatcaactagactactaagtgaacactttgcagatttggctgtcttcaggtttatatcaaaaggcaagattgaataatgcttgctgcaaagtctgaacttcatataaatgcatatatatattacgtttatttgtaaggctatagcacaaagggaacatttttgtgttttaacatgaacagctgtgctgtgaagagaattctttataaagacctgtagattcctacaactttggtttaagttgtaagtcagaagattgttggatatttaaggctatctttaatatatttctattacagtctccttaaaaaccaaaaaggaatgcattaatccacatttccctccttcagaggtcctggttcttggcaaggaattactatgtgtgtaggtccttccccagaaatgcagctgctcatgaggctgaaagaagaaggctattttgttcctttgcttactttttatactacactgatgctgcttgatagaagtctgtggctttgtcagaaatgtcatcccagtaaatgctttgtagatctgattaaaaagaacacttgacttgggaaaaaaaaaaaaaaaaaaaaaaaaaa

SEQ ID NO: 514 - DNA, 610 bp, Rattus norvegicus
ttttcaacagtttaaataaaaatttttcctcatgatgttaagtgaatgttattttctttgagaatatctcttttttcattaaaataatttctgaaccactctatatgctcgaccttctgtctaacgctcagatatgggtttttcgagaggccacaggtcaccagctccatgaacaggcgaattggtccttgcttggggaaatcctccaggtgcttctccaaaaatatatgctcatggaactctgagccatcatcgtcaagacctgcttcattgttaactgggaactcccacagtttcccctcctttgtccactgtatcatctcctcaaacccattcccaaacggctgttcgcttactgtggctaattgcttagcaaattctatctcccagagagaaggtgctgcttctggttcaggtgcttcgtcgtcaaacgccttaacatcaaaaatcgaaagtcttttccccttgaacaaacatttcctccttctgaaatcagctggcttctcctggctaagcgaactgtccacttcttcgtcaaactgaatctggtgctgtggtcttgaactaactctcatcgaaggggatttggcaattttcatattcgatatta

SEQ ID NO: 515 - DNA, 640 bp, Rattus norvegicus
aaacaaaagcgagaatttattaggcaaacagacttgcagagattccaaaagctgtaatgggtcaatagctagagccacattttcctataggacagaacatgctgtagtcaccaattctagttctgggctctgtaccatcctgagggtggtcctgcttgtaccctgcacgagggactagagcgtgggttcgtttttgcttgcctttttatctttatagtcctttacgctggcctcaaacttgacaagcacatgctggcagacattcaagagctcattcaggcctttctgaaacggctcaacagctggaagtgcaccccgtgtctgaattcgcaaattaattttgctctctgaaggatgggtcgtagtgtaaccacaaaattccacttccgggttcttcatgattatgtaccgcagacaatttcctagtgtatggtcctcctcgtgtagtacaaatgtcacacactgtctatctgttccagctgcctggaccatttccagggctgtcttcctctcgccttcagccattgaggtcttcaatcctgatatttttctctccagctcctgatcgtcctccatcgcggggggcggctccgggaaatcctcaggtggcgctggcgaaaaggaagctcttccccatgtc

SEQ ID NO: 516 - DNA, 567 bp, Rattus norvegicus
gatgcctgacaattggacaagtccctttctgacaacagaccattatgttgaatcctgcctgcaagacaagctgctcgaattcacttaaggagctggagggcagtgctgaagggggccaggttctcacaggacttaagccaccgctgcacattggtgggcgctgccccactgcttcccccagtctgctggagcacggaccacagcaccacatctgccacagtgagctcattcccaaccaaccacgggcttttccccaaagcggagttcatagagcggaaaacagccgctttttccttactgctcccttctctcagctgaaacatggcgatatccacccagctgtcgatgagggttaggtggacagcgttatgcttctgaccaaatagagagaacaggaagcgtgcgatgttcccttctccttcaatggggcacatcgtttgtacactgaacttcatctgtgtcttgggcacgttcttccaaatcagagtgaagcccagctgatactcgtggcgggactgttttctagcctgctccccgaagcacttgagaagattctcaggtacattc

SEQ ID NO: 517 - DNA, 631 bp, Rattus norvegicus
actagacacctttgataatgatagaatgagtatcttgtcttaaacattctcagcactatgcccttattacatatgacatctaaaaacaagatactcattctatcattatcaaaggtgtctagtaaaaaaggaaagattgacattgaagatgggactagaaacccctacttaggggccttcaaacggtttctcacacacatctgtgaggtaggttattatccacattttgtacaagagaaaactacacaaggttacataccttgtgctgccataatagcaaacagggaattagatccaattagatccggtccttagctttgcatttcttttctttataaactttaaaatataaagactgctagtaattgcattcattttaaaagcataagaaggcagccaaatagtttcccgggtggctttacaaagtgaaacaaatgaacagaaaatgcattcagtgaagacattccaatggtgacgctgtaaggtctggtcaagtggaaccaaaaggcagaagcaaaccacgtgaccgcctgtgggacaggtctcaggaaaacgggggagctgggggcagcagactttgaacacacgtttacggctactctgcaagtatttgagaatgcaccaggtactc

SEQ ID NO: 518 - DNA, 615 bp, Rattus norvegicus
ccacatgtgcaaaagtttcccagagagttgggccccacaatgtgtaaaaaagacccccaatggggcagagctgtgtaaccataaaaaaaaaatagtaagagaaatcagtttcccaggaggcctggcttgggtggagcatgtcactcagggccagtccgcatgcggtgtgctgtttgttctggaactgctttcttctgattgttctttcttttccaagccccttactctagggctatggccaccagacggcctgacagagtcctcaggcatggtggtttgtgaggatgacttctttcacacacagataccccaactcagtgcttgcccactggcatcagccccactatgatccccagggcttccccccaacccgtttaaccccttatatcacagtctcggcccccagcttcaccaagtcttccctcaggacacctttgagggacactgaaacaaaacagataaaggcccggccccccacccaccaagtggcacagtggggtacgggggattgtatcaccccgtcacacctaaggcaggtgttttagtgtctgattctgtgagtgtggataggggggtggcacatctgtgtgggtatgactttggcaggaagtgggg

SEQ ID NO: 519 - DNA, 2021 bp, Rattus norvegicus
cctcacgggctgggaggcctgggcgttccgggagaccgaattgcggtgtgagccgccgtggggactgcgaagcgggccgggagtccgggatggagccgcccggaggtgcttgaggcgagcgggtggagcggctgcgacggactggtcacgtcagcggggacatggctcacctcaggggcttcgcgcaccagcattctcgtgtggacccagaggaactcttcaccaagcttgaccgaattggcaagggctcatttggggaggtgtacaaggggatcgacaaccacacgaaggaggtggtggccatcaagatcattgacctggaagaggccgaggatgagattgaggacatccaacaggagatcaccgtgctcagccaatgtgatagcccttacatcactcgctacttcggctcctacctaaagagcaccaagctatggattatcatggagtacctgggtggtggctctgcactggacttgctgaaacctggtccactggaggagacctatattgccaccatcttgcgggagatcctgaaaggcttggattatctgcattcagagcgcaagatccaccgagacatcaaagctgccaacgtgctgctctcagagcagggtgatgtgaagctggcagacttcggtgtggctgggcagctcacagacacacaaatcaagaggaacacatttgtgggtactcccttctggatggcacctgaggttatcaagcagtcggcctatgacttcaaggctgacatctggtccctgggcatcacagccatcgagctggccaagggggagccgccaaactctgacctccaccctatgcgagtcctgttcctgattcccaagaacaatccacccacattggaaggccaccacagcaaacccttcaaggagtttgtagaggcgtgcctcaataaggacccacgattccgacccactgccaaggagctcctgaagcacaaattcatcacacgttacaccaagaagacctcctttctcactgaacttattgaccgatataagcgttggaagtctgaggggcatggcgaggagtccagttctgaggattctgacattgatggcgaggctgaggatggggagcagggtcccatctggacgtttcctccaaccatccggccaagtccacatagcaagctgcacaaggggactgctctgcacagctcacagaagcctgctgagcctatcaagagacagccaaggtcccagtgcttgtccacactagtccgtcctgtctttggagagctcaaagagaagcacaagcagagcggtgggagcgtgggtgccctggaggagctagagaatgccttcagcctggctgaggaatcctgtcctggcatctcagacaagctgatggtgcatctggtggagcgtgtgcagaggttctcacacagcagaaaccacctgacatctacccgctgaccaaccaactaactgaatgcactactcttcacagagagggagaagaatgctttttgttttgagctctaaaaggactgacttggaagccctcttgtgttgtgttgcaactgtacagaccaaccagcttcacaagccaggttaccttccttctgccctacacagcagcccctcgacacctgtgctcacctccttggttgactgaagctatgaggcacccaggagcccttacagacctgggctggaacgtgggaggctggcgtgaccgtctgtagaccccacagcccttgcagtggggagaccacggagcacaggaactactgggcagccctggctcttcctcctcaccaggaacatttcttgagggctcacaggggcccaagatggtcataatttgccttgtggtgtcagttcaggtactgtgtgtttttcaaatcatccagaatattttgggcttttttttttttttttttttaaagaaaattgaacttcctgagtattctgacagtgttagttttcatagagcattgaaagccctaccatttcaataaatacctggattggaaaaaaaaaaaaaaaaaa

SEQ ID NO: 520 - DNA, 500 bp, Rattus norvegicus
aaataattcgctacaatcctgccacaaattaaagaaaaaattaacatggtattcacagagcagaattctttaggacaatcaaaatcccagagtacttagaataaattaacatcaaattgtgtttatattcagatagcctgattctctcctctgaaatgaaatggagaccattgtaacctagggtgaacgaacacacttgttcttctgtatagacatgaattctttacataaactcaacattaatttgaatcaagttaggaatcctgagaaagtcacccacctacaggcatacaaagacacacacagacagacacacacacagagacagacagacaggcaggcagacacacacacacacacgcacgcaccactcttgagaagcagtgtttctcatggacacttactagaaggtcatttctcagaagggtctaaaattctgaatatttggatgctatcatccccccgcccccaagaaaatcgtcttgtttcaagtgtgacag

SEQ ID NO: 521 - DNA, 511 bp, Rattus norvegicus
  misc_feature (1)..(511): n = a or c or g or t
aacaggatgactctactgtacacgtttgtttaatgaacagagtgtaaaatatttatttccatattcattttagtctaacttctagtaatctggacatgaatggtgaacttgctttactgaagaacatggctgctcaactgaatcgacatgtcccagtatcaattaatttcccggatactctggagcctattggcgagattgagcatcaatttccccaccgcggttaggtcaggtgctcacaaatacccatgcgcatgtgtgatagaaacggactgattcctgtagatggtcattctccacgggtgttcatgagtagatatgtttccacatgtgctagtccccatcgttttgctacaagtggaaaatcaaatgtcttcgagaacaagaaaacccacacagaaagccagtgtttcttttctaccacacatgctctagggaggtgggcangagtggggcttgnggacggaaggggatctgaaccgcactacanatgagtgacangagactgcct

SEQ ID NO: 522 - DNA, 1334 bp, Rattus norvegicus
gagcgccaggccaatcggaggtgctgttgtttgtcagtcccggagccggtccgcaaaggaaaggtggcaagatggtgttggagagcactatggtttgtgtggacaacagtgagtacatgcggaatggagacttccttcccacccggctgcaggcccagcaggatgctgtcaacattgtatgtcactcaaagacccgaagcaaccctgagaataacgtgggcttgatcacgctggccaatgactgtgaggtgctgaccacactcacccctgacactggccgaatcctctccaagctccacactgtccagcccaaaggcaagatcaccttctgcactggcatccgcgtggcccatctggctctgaagcaccggcagggcaagaatcacaagatgcgcatcatcgccttcgtgggtagccctgtggaggacaacgagaaggatctggtgaaactagctaaacgccttaagaaagaaaaagtgaatgttgacatcatcaattttggggaagaggaggtgaacacagagaagctgacagcctttgtgaacacattaaacggcaaggacggaactggatcacatctagtgacagtgcctcctgggcccagcctggccgatgctctcatcagttctcctattctagctggggaaggcggcgccatgctgggtcttggtgccagtgactttgagtttggagtagatcccagtgctgatcctgaattggccctggcccttcgtgtctctatggaagagcagcggcagcggcaggaggaggaggcacgacgggctgctgcagcctctgcagctgaggctggaattgccacacctgggactgaaggtgaacgagactcagatgatgccctactgaagatgaccatcagccagcaggagtttggccgtgcggggcttcctgacctaagcagcatgacagaggaagagcagattgcctatgccatgcagatgtccctgcagggagcagagtttggccaagcagaatcaggggacatcgatgccagctcagccatggacacatctgagccagtcaaggaggaggatgactatgacgtgatgcaggacccagagttccttcagagcgtcctagagaaccttcccggtgtggatcccaacaatgaagccattcgaaatgcaatgggctctctggcctcccaggccaccaaggatggcaagaaggacaagaaagaggaagagaagaagtgaggccggagggaggggtagccgagtctgccctggggactgtaaggatggggttggataaagacttagatgtgctctgcggccttgacaacggaataaagcttggagttttccctttgcttc

SEQ ID NO: 523 - DNA, 633 bp, Rattus norvegicus
  misc_feature (1)..(633): n = a or c or g or t
agagtgaaatgatggcagtgatgtcaacatcatacggggaacaccaagtccacactttgccccgagtcaactgcaaccacatgcgtcttcttgcttaaggcacctgagcccacagtgacagaataggtccctggatagacttctatgtagaggtccttagagatgttctcaataggccaagatgactcttgagaatgctctgatgtttgatagatgcttcctggaccaacagatgtctctcctctgcagtttctctgtgctcactcctgccatttttgttaagcccctccactccactaccttgagatgactcgagctcaggagagccacctgcctctgtctcccaggtgctangattaaaggcatgcactaccacgcctggctcagaaacagaacctctagaacaacccatttgtagtcccacatgtacaagattatgtggcttttaagcctgctaagacttcagagcacctcgtgccgattcttggctcagggcaaatccctatgtgagtgtataaatcgtaacattcatgctgttccgtgtgattgtaccgccaaattcaaaaaattcaccggacataatgtaagctgcgtgccaaggtggctaccacataatgttggccacgccgcttc

SEQ ID NO: 524 - DNA, 460 bp, Rattus norvegicus
cacaataaagtttattatgaaaacaggctcatgtggggacagaggggaagacaaatacatctgggttgggtggctcaggtgaagtagtgcggcttcttcacattgatgccatactcgctgagggcaggggtcaagtcctccatggttagggtgtacttgcgatccttgctcttgctccgggagctgccagaggctgtacccttcattttgcagtgctgtagggcatcattggcaatatctgagatgaatttctgggcagctagtgagatgagccgaattatgcgtgggtctgaagcttcaaagccagcacggttcaggtagtaaccagtcactgcatccgggatcgtaggtgtataatcctccaactgcatcaagaagtccactagtggtgtgctggacactacgggcttcacttctccgttggccgcgctcggtagggcgtaaaccccgtcctcgtgcc

SEQ ID NO: 525 - DNA, 1718 bp, Rattus norvegicus
gccgctcctcacaggcgctggcggcccagggcggcctacagcagcgcccgcccggcgtcgcagtggtccccttcgccccgcaatctgggctggcagcaatggggggggggaagaagagccaacctaagagttattaccgttagcagcgacgacagcgactaacgtcgacgacggaataagcgtctcacttggctttcgccccttcctccaggaaccggacatccggctgctccagatcacgtgatcatccgccatattgactgtagtggcctctgctccgaggaggaggggtatcagaccggctctgcttctttaaggcgtggcttccaagctgggggaaggttctgtggattgtgtggagggaggtggaggaggaggaggaggaggaggagatggcggcgacggcgcaggaagatggcgtccgcagcccggctccagggccgcggggttgcgagcactatgacagagcctgtctcctcaaggcaccttgttgtgacaagctctatacatgccggctatgtcacgacacccacgaagatcatcagctggaccgcttcaaagtaaaggaagtgcagtgcatcaactgtgaaaaactccagcatgcccagcagacttgtgaggactgcagcacactgtttggagaatattactgcagtatttgccacctgtttgacaaagacaagaagcagtatcactgtgagagctgtgggatttgtaggattggtccaaaggaagatttttttcattgcttgaaatgtaacttatgcctagccatgactcttcgaggaaaacacaagtgtattgaaaatgtttcccggcagaattgtccaatatgcttggaggacattcatacctcccgtgtcgttgctcatgtcttgccatgcgggcatctcctacatagaacgtgttatgaagaaatgttgaaagaaggttacagatgcccattgtgtatgcattctgccctagacatgactcggtactggagacaattagacattgaggtagcacagactcctatgccatccgaataccagaacgtgaccgttgatattctctgcaatgactgtaatggacgatccacagtccagttccatatcttaggcatgaaatgtaagctttgtgactcctacaatactgctcaggctggaggccgcacagtgtccatggatgagcagtgagaagcctgtccttggctggagaacagctctgggatgtagatgaagctctgtgtggaagaccccgatgtccggatgtgtcctaactatgcgtagagatgtttgtacctgtcaacagatcatacctatacaccaaggactcaagatctcagatggaatcagaatatcactcactggatgaagcctctgagcgtgtgttgattggaaagtcacttagtgtcaagttttgaagccaatgatgtttgtcccagatatagtcacagtcatcgaaatattttatattttcatggaactttaagtgacactatgcacgcagacttaatttctagttcttgatagaactacattcaattttaactagtctttgattttaagggctgtactataatttttaagttcttattgttaaaatctaattacatgtgctttttaattttctgacagtccttaggatcctatacataaaattttatgtaataaactactaatgaaattgtaaaaaaaaaaaaaaaaaaaaaaaaaaaaaaaaaaaaaaaaaaaaaa

SEQ ID NO: 526 - DNA, 601 bp, Rattus norvegicus
  misc_feature (1)..(601): n = a or c or g or t
ggcagcggttccagatttaatggaaggtgcacggtgcgctgcttcgcaccctgaggccgagctgctgcagcgccaggtatggagcgtctgcttttcgcaacggaacagaagaactgagcatacaacttaacaagaaaaaaggccctcctgcctgcctctgagaccgggggatcaggtcacctctgaccccctgagcctgggggcctccccacctccactgcccttctgaagtcgattcctccagaaggagcctagctaggacagccccaaatgggggcaaacagggagcgggatgctcagagtccccttctcagagcccccctcccagtcattttaggaacaataaatactgtgtgacagtagcaggaagggcgtccatgggctgtatgtgtggcagcccaagcaggctggccaggtgcctgccctcattctgtgcgtaggatgatatggatgcctgaatccgtgaacaccggcccactcatttccccggtccgtanagcaaacgatgcatcttcgaacggtttctgcatctgacctctgctgaaggcacccaggtctcccctggctttggcanagctgcagtcactgaactgtgaggcca

SEQ ID NO: 527 - DNA, 680 bp, Rattus norvegicus
  misc_feature (1)..(680): n = a or c or g or t
ggacttagcttccactttattttcatgtgcatcatggaaaggtgtcaaggacaaagacaagcccagtgctgcctgctctaagtaaaacacagaagagacaacacctcacccagttcaacagttataaaacccccaacccacagagcagacacgagcagtgtgggagtccaggggtccccacacaacatgacaagattttgctttttattattgttgctttataataaaaacaagttgctatgctttcagcaaaacaaaaacaaaacaaaaaaacccatagaaatttaactaacagcagttcaaggtaaggcttttgaaagatttattgaaataaattatcttcgcctatccgcctgttatccttttctcagttacttgtcaacattctaaaaactttcaggtatgtaaaatacatttaactttgccaataattttagataatactggattttccccaaaaggactaccataaaactatgttttgaaacattaaaaaaaaaaagcttaatccaatgggacataaaactatgtaacctatgattgcatgtttcaaatccttaaatacgtggagaatttgagatctgggaacaagactgcttgaggcatgtggattattcaatgtcctgcttctatttgatgagacccacaggaaccanagcaggagaatgaagggctccggg

SEQ ID NO: 528 - DNA, 625 bp, Rattus norvegicus
  misc_feature (1)..(625): n = a or c or g or t
aagagagataaatctttaataaaactataaaccaaaacaagactgggaaatgtgtctaaagaatgacaccacaaacggcaggcagcttgttctttacaaactgtcaatgttaacaaacccagtctatgtgactgttaatgcagtaaccttgctaatcagactgaagaggggccaagtggctcacttgtgcccttggtggacacaggagcttgctctcatgactaagcacagggaacgacatcccactcctggttctattactgatctggtcaccaaagtacgcggagcacagaggcctgcagcaccagcgcatcaggcaaaggtgatggaaggttcgctgggctgccacacgctctcatcgtacagatcttctggaagttcttcttcgtctccatcaggaaagtaggtagggaacggcaggctcttacagaaatccttgtatgcaggcagcgtanagtccttgatcttcactaagcaatttctatgtccaggcacagagccattgacatagattatattgtgcttggtgttcactctccacaccttcagcccatacactgtcctgttttggtttcccatttgcccgggcattttagttccaggccagactctggcaatatcccca

SEQ ID NO: 529 - DNA, 1610 bp, Rattus norvegicus
ggccgggcggaactttccagaacgctcggtgggtggtagaggagcagcgtctggccgagctgcgctgtgctacgctcctctttccgctctccggcgccggcccgctcaccggctgtaaaaaatggtgaaagaaactacttactatgatgttctgggggtcaaacccaatgccacccaggaagaattgaaaaaggcatatagaaaattggccttgaagtaccaccctgataaaaatccaaatgaaggagaaaagtttaaacagatttctcaagcttatgaagttcttgctgattccaagaaaagggaactatatgataaagggggcgagcaggcgattaaggagggcggagcaggtggaggttttggctcgcccatggatatctttgatatgttctttggaggaggaggaaggatgcaaagagaaaggagaggtaaaaatgtcgtgcatcagctctcagtgaccttagaagacttatataatggtgcaacaaggaaactggctctgcaaaaaaatgtgatttgtgacaaatgtgaaggccgaggtggtaagaaaggagcagtagagtgctgtcccaactgccgggggactggcatgcagatcaggattcatcagattggaccaggaatggttcagcaaattcagtcagtgtgcatggagtgccagggtcatggagaacgcatcagtcctaaagacagatgtaaaagctgcaatggaagaaagatagttcgagagaagaaaattttagaagttcatattgataaaggcatgaaagatggtcagaagataacattccacggtgaaggagaccaagaaccaggactggagccaggagatattatcattgtgttagatcagaaggaccatgctgtttttacaaggcgaggagaagaccttttcatgtgtatggacatacagctggttgaagcattgtgtggcttccaaaagccaatatctactcttgacaaccgaaccatagtcatcacctctcatccaggtcagattgtcaagcatggggatataaaatgtgtgctaaatgaaggtatgccaatataccgtcggccatatgaaaagggacgtctaatcattgagtttaaggtaaactttcctgaaaatggctttctctctcctgataaactctctttgctggaaaaactccttcctgaaaggaaggaagtagaagagactgatgaaatggatcaggtagaactggtggactttgatccaaatcaggaaagacggcgtcattataatggagaagcgtatgaggatgatgagcatcaccccagaggtggcgttcagtgtcagacctcttaatgggccagtcactctttgaccttgtgtatgcagtagtgaatgtgggaaggactgtaatcataatatgctcactacttggctgttgtttttgttttaatattcaactatagtagtgttttaaaagttaaatgaagaataaacacaaatataaaagctctgactttgccctgtatgtatgatgactttaatgttcaagatgaaaatgaatacttgtaaaaaactagtttaaaaaatgccctagcatctgttaggccatatcttgtgtaactgataatagcgtgtacattagactgac

SEQ ID NO: 530 - DNA, 473 bp, Rattus norvegicus
gaagtagtgatatgttatattcagacatgagtacatttcaacagtcttttgcaataaatatcataaaataatagagattcgcataataaatattctttacaataaaaaaaagtttaacagacttttgtcttaaaaatagccaggattcaactttgtgttttatacataaaatatacaaaaagcaccacaatttgtggttaaggcaatgaaaacacaggaagggttggaagtgctcagctgttaaagagtcaaaaggccagccaggagccaaaggcaccttagggagctgcggctgagacaccggggcagatcagataggaatgtcaactacggtgtccaagcgccccctcagtgaagtggggggtgcgaagggaaggccttcacggatactgggtgctggaggaggagaaaggagggttgccaacatcatctctgatgtgaagaccaacaccgcacagtgaatccagagctgt

SEQ ID NO: 531 - DNA, 539 bp, Rattus norvegicus
  misc_feature (1)..(539): n = a or c or g or t
acaaacatagactttattaaatgctgctcaatccccagtgaagatctttcattataaaacggttttccatacaactgcaaggcaagaggttggaatggtactgataacaacaggtgtgaaaaatacccgaccaggtaaaaacatacaaggcttctacgcagtcaattcagagtttgcccactgcatttcccttacacaaagccaggcagtgatagctagcagtccgcatcacactgtgggacccagggcctccttcaccctgcaggcaggcctgggacgggcaggttgaggactgggaaggccctgcctccagccttggaggaatgaaggaggtgagctagggtccacccgccggtgctgctctgcgcacgctctgggtgctgctgctgcaggggatttgggaacagtcaacatttggtttacttccccccagcttttaatactttgtgcttcggaagcctggaaacgcaagatgttgcaaaacccagagtatggcagtatctttaatgaggctgggcctttatctcnccaaccgcctc

SEQ ID NO: 532 - DNA, 2355 bp, Rattus norvegicus
gctcccggaagtggagggtttacactgagtgccgctgggtctgagtgaccgaaggcagtagcgttcgcggagatcgcccgctggccctcgatcaccatgtcggccttcgacactaaccccttcgcggacccagtggatgtaaaccccttccaggatccttctgtgacccagctgaccagtgctcctcagagtggcctggctgagttcaatcccttctcagagacaaatgcagcgacaacagttcctgtcacacaacttcctgggccctcccagccagcagttctccagccctcagtggagccagcacagccatcgccccaggctgttgcggctgcagcccaggcaggcctgcttcggcagcaggaagagttagacaggaaagctgctgagctggaacgcaaggagcgagagttgcagaacactgcggcgaatttgcatgtaagagaaaacaactggccgccactcccctcatggtgccctgtgaaaccctgcttctatcaggacttctccacggagatccctgccgactaccagcggatatgcaagatgctttactatctgtggatgttgcattcagtgactctgtttctaaacctgcttgcatgcctggcctggttcacaagtgacgcagctaatggaacagcctttggcctctccatcctttggtttctgattttcacgccctgtgccttcctttgttggtaccgacccatctacaaggctttcaggtctgacaactctttcagcttcttcgtgttcttttttgtatttttttgtcaaataggaatctacttcatccagttgattggcttgcctaacttggggaccagtggttggctcgcagccctctctacagtgaataaggggcccttagctgtgaccatcatcatgatggtagtggctggcttctttaccctctgtgctgggctctcactcttcctcctgcagcgggtccatgccttctaccgccgaacaggagccagcttccagcaggctcaggaagaattctcccagggcatcttcagcagcagaaccttccgcactgctgcctcgtctgctgcccgaggaaccttccaggggaattagtcttcctgactctccttccctcagccctggcctctgtcacctgccttctgagctgcactttccatgggtgccttagcagtggctgtgcccagcacagaccaggcagggattcgtcttgtccctgcactttcctcagtagtcagctttctcttctacaggagggaaggacaggaagggacaaggacttttttttttaacacatgggaaaagaaaaaaataacaaagctgtctttccttttctaacggtggtttggtaggattttgtctggaagcaatgggcctgcttttcctgaaaacaaatggactcatgggtatgggatcatgggccagcctgggctcactgtaccagggatttcccacaggcactttgcattcctccctctataggcttcatctgtactggggcctccacagtcttgcctttcatgcttgggcttcatgagcctccccagggctacactctaggtgaactgtgtactgggtgggtgcacagaagtttcccagattatcttcgggggtcttcaggtgttcacgatagtcacgaccctgtgcctgcttcgactcatggtgtgaccgcaccttgtgtcctcggggccttccctagcccctcttcagacttctgaatgtatagtgagtggggttggttgggacttggggatggggagggactgaggacaagtcaatcaagtcctgcccagcctctagcagtcttctgagagggtaggtgtctgctgacctgtttgttgtggcttctctcctcccaagggactctgcccctccgccttaccctggcccctgcccatcttcagcaatactcacctcttacaactcttagggtggtttggaggaaatcagtcctgaactatgtcctgcaggcaggactgctgagccttctttctgagggttcttcccacaccctcagtggagtctaggttcctatccactcatcttggggtgctccacaggtgtcactgcagtggcacttaggaagccactgtgagaacctggaccctgtgctttgtgagtgttgtaagcactcgccaagctggccagcctcctgcctctgggaactggggccctcctgaggctaccctcatgctgtcagcccatttagccctagagccaccaaatggtaatgacagccacaagggttttgtaaactctctggtattattttcctccatgtacaaatgtatatgtcttgtctcaatttttgtgctttaataaaaagattttcggacagcaaaaaaaaaaaaaaaaaaaaaaaaa

SEQ ID NO: 533 - DNA, 452 bp, Rattus norvegicus
aaaacatgattacaagaaaagaatacttcatttacgtgtaacactgtcttcatggacgtaccgtggtcacggagtagaaatacaacatgagtatacaggaaaggagaggagagaccggtgtttggccctggtggccccctcacagagacacagaaagcagcagacacctctgtgcattcaatgggacagtggacacttgtgtttggagcagccagagagtcagggaggatgggcaaagccacctctgggaccctaatttcgtgtggtaaccccaaagagatactggtctgcactggtggaggctggctcctgtcaggttcttcgcagccttcagggacaagctgaggctcctgagtgcccagtggtttgtcgcatagcttgctgggcccatgggctccatggtgtgaagagaaaaaaggccaaagtgggcgactggctgatctctaggtgac

SEQ ID NO: 534 - DNA, 640 bp, Rattus norvegicus
cagttgtgggagccacagtgcgggcgggcgggtctcacgggcggcggcgggagcgcgagtccgcccgcgtctttcaccttccggagaaaacatttcaagcggaggatccggtatctcgggattccgaagtctcccggtgtgagactcaaatttcaaaatggactggagcctgcgccccgcccccaccctctaggcggtcgggggccgtgggaaggctctggggccctgcggggctcagaagactgcccaggggaggcgctctattgcggaggctcgaactaagggggccacggacgcgctactttggtcgtggccgtggacatagagacctagcccgatttccacgcggaccagcaaacctggcgcacaccgaggtagttggcgggaaggtacagcagagacgacgcaggtgaggccagggtccggggtcggggtggctatcaccggccgctggccgcgtacttggccttggtgatgagatagagcacgatgtcctggtggcccccgaaagcggcgatgtgcagtgcgctccagccgtcgcggttggctaggcggatgtctgcgccgaatttgactagcagcttcaccagctccaggttgccgtcgatgactgactggtgtagtgctgtctggccctccg

SEQ ID NO: 535 - DNA, 632 bp, Rattus norvegicus
  misc_feature (1)..(632): n = a or c or g or t
aataacaagaaacagaacatcagtcccttatttgtacaaaaatacctgaaagtttacaattaggttcacgagccaaagagctatatagcacagagtgaagcaaagcacgcgggataaaggttttgtctatcaattaacaccctctgcattccctgaaaacgtttacatgtcaggtcattttccggtcactgcagtttacactatgatatcacaaatctacgatgagctagtagcgccctcggaggcacagtgatcggacaggctgtcaggtatttaagtgcagaaaggagaagacaaaacatctaagctgaggcacatatttcttcaaagtttaagcaaacaaaaaaagaaaaaagaaaacacgtttggaaactcttaacacctaataatataacagagcctacgtattaaaacgctaaaaacccaaagcatttggcattttccttctcaacttagtccaggtggttacacggagttgttcttaagaaaagaaaatcacaggcagagattgcaaagtcaaacaggctccaaacaaccctgagctgtccccttacattcatgtcaattaaatacaanaataaaagtcaattgtccttcagtctccggttaagggcggctgggtgcccgctaac

SEQ ID NO: 536 - DNA, 663 bp, Rattus norvegicus
gaaaagcagccttttaatatctaattgaatccagtgagtgggaaagactcaaaacatatgtccccttgagaatacctttacaagaacaacaggccagaggcgtctcttccatgggaaactgacatcccctgtgtgctcacaaaagtgaggtctcaactcatatgcatgccacatagtttccaccccatcccaccctgcccaccctccacaggtgacagattcacacaccgaagggactggtttcttaaaccgtggaacagaatgtttaaaagaagataaatctagccaagtggccagataccagaaataactcaggggcagttttacatacacaataaaagtcaactcatataaaaagggaagttttgctaattggaatcagaggcaaaaattacaaatggcagagaatccagctacccatatgagattatttaagaaaaacaaaaaaccaaaccaaaccaaaaaaaaaaaaaaaaacacccccaaaccccaaaagtccctactggagactcccttcattacaaaagtatgcaaacatctcaatataaacgaagcccaggcccacggctcgctctctctggacaggagagcatagctaaaattccccgtgtggaattcatgcctggaccaatgccccaccctttgggaaagaaagggaaggat

SEQ ID NO: 537 - DNA, 547 bp, Rattus norvegicus
tcgggatacacaggcacaggcacctgcgggcgcttcagtcactcgggggactggcgcgccccacagaaccaaggatgggcttttataggattttggggagcagaagcaagcatacagaagcagatgcatggttacagggatataattggtggattctaatatggcaagggtttagcccgggggcaagtttcctagctacctttctgaaacataacggctgactcggccccccaagggttcagcccgggggcaagtttcttagctaccttcttggaacataacgactgactcggccccccaccagggtgtgggacctctcccggggcttttcttcattgtcaggtgctcaaccgaagtcgtcctgttgccaggccttcaaccaaacatatcttgcttggcagccgctgtgtactcagtgttctaacctttccctgaaccagtcatcttaagtacagccttgcaaaatggcgttactgctgctaagctggggtctttcattcccccattttttttgttaactttgagtgaaatctttcactcgacttgg

SEQ ID NO: 538 - DNA, 1987 bp, Rattus norvegicus
gtgagcgagagcgccctagagaagcgcctgcaatctctgcgcctcctccgccagcacctcgagagaaggacacccgccgcctcggccctcatctcaccgcactccgggcgcattcgatccggctgctcgcccgctccttggcttccgtgtcgccacgctcgccccggctcctcctgcgcgccacaatgagctccagcaccatcaagacgctcgctgtcgccgtcacccttctccacttgaccaggctggcactctccacctgccctgccgcctgccactgccctctggaggcgcccaagtgcgccccgggagtcggcttggtccgggacggctgcggctgctgtaaggtctgcgcgaagcaactcaacgaggactgcagcaaaacgcagccctgcgaccacaccaaggggctggaatgcaatttcggcgccagttccaccgctctgaaagggatctgcagagctcagtcagaaggcagaccctgtgaatataactccaggatctaccagaacggggagagcttccaacccaactgtaaacatcagtgcacatgtattgacggtgctgtgggctgcattcctctgtgtccccaagaactgtctctccccaatctgggctgtcccaacccccggctggtgaaagtcagcgggcagtgctgtgaggaatgggtctgtgatgaagacagcattaaggactccctggacgaccaggacgacctccttggattcgatgcctcggaggtggagttaacaagaaacaatgagttaatcgcaattggcaaaggcagctcactgaagaggcttcctgtctttggcacggaacctcgagtcctttacaaccccctgcatgcccatggccagaaatgcatcgttcagactacgtcctggtcccagtgctccaagagctgcggaactggcatctccacacgagttaccaatgacaactcggagtgccgcctggtgaaagagacccggatctgtgaagtgcgtccttgtggacaaccagtgtacagcagcctaaaaaagggcaagaaatgcagcaagaccaagaaatccccagaaccagtccgatttacttatgcaggatgctccagtgtgaagaaataccggcccaaatactgcggctcctgcgtggacggccggtgctgcacacctctgcagaccaggaccgtgaagatgcggttccggtgcgaagatggcgagatgttctccaagaacgtcatgatgattcagtcctgcaagtgtaactacaactgcccgcatcccaacgaggcgtcgtttcgcctctacagtctgttcaacgatatccacaagttcagggactaaaggtctcctgggtttctagtgtgggtcggacagaggtgttgagcatcgtggagacgtgggcagacggtgggcgaacagtgccttgctcatcatcaagtaggattaaggtgtttcaaaactgccgtaggggctgctgctatggatggacagtaacgcagtcgcagttggagaatacttcgcttcatagtactggagcccgggttacgtacgcttcatattggagcatgtttatagatgatgttctgttttctgtttgtaaattattttgctaagtgtttttttttctttctttttttttttttttgctccatttctccccctccccccttggttctacaattgtaatagagataaaataagactagttgggtcaagtgaaagccccgcttgtcctttgacagaagtaaaatgaaaggcctctcctgccttccccagtggaggcaggggacactctgtgagtgcccttgaggctactacctgcactctaaactgcaaacagaaaccaggtgttctaagattgaatgtttttatttatcaaaatgtagctttcggggagggatggggaaatgtaatactggaataatttgtaaatgattttaattttatatcagtgaagagaatttatttataaaattaatcatttaataaagaaatatttacct

SEQ ID NO: 539 - DNA, 335 bp, Rattus norvegicus
  misc_feature (1)..(335): n = a or c or g or t
caagtgagatgctcgaagtttattgcaaagaggaaggcggggttggtgtagggaggtcaaggaggcagagggcaagggagtggagtngtttttgggcgaagtatgcgagggttggcgttgagagcgttgcaggtagggagggtgggtttggattgattggtggggggtgtattgggtgcttaataggtttacggtttgggggttcgtttttaggtttaatagtatttttaatttatttgggtgggatgttggttgtatttgggtatacaactgctatggctactgaggagtacccggagacttgagggtctaattggtttaattttagttttttt

SEQ ID NO: 540 - DNA, 1840 bp, Rattus norvegicus
tggaactgctgagcccttcgtctagtcgctttctccccgggggttctttccagtctctgcccgcgcggcgtccgaccgggtgcccttctctctttgcaacgcgagccgtctcctgtcctcaacttccctccccgcgcggtgaagcccggccggagcggcgatgcgtctcatccagaacatgtgtaccatcgcagagtaccccgccccgggcagcaccgctgccgactgctgcctgggggctgcaggccgccggctcgtcaagatcgccgtggtgggggccagtggcgtgggcaagaccgctttggtggtccggttcctcactaaacgattcatcggggactatgaacgaaatgcaggtaacctctacacaagacaagttcacatagaaggagaaaccctggccattcaggtccaggacactccaggcatccaggtgcacgagaatggcttgagctgcaatgagcagttgaaccgctgcattcgctgggcggatgccgtcgtcatcgttttctccatcaccgaccacaagagctatgaactcattagccagctccaccagcacgtgcagcagctccacccgggcactcggctgcctgtggtggtggtggccaacaaagccgacctcttgcacgtcaagcaggttgaccctcagcttggtctgcagctggccagcatgctcggctgctccttctatgaagtgtctgtcagtgaaaactacaacgacgtctacagtgctttccatgtcctgtgcaaagaagtgagccccaaacagcaggccagtggcactcccgagaagcgcagaacctcgctcatccccagacccaagtcgcccaacatgcaagacctgaagaggaggtttaagcaagctctgtctgccaaagtgaggactgtcacatctgtctgaggcacgactcctggagggggtttggtcttctgggcagagggcccgaggttcttcttagatgggaccattgcaggcggatgtcagatcatggttccagaaagagcagaggcagaggggcctaaggggcctttggaattctgcaacactgggagtaagggcagatggacagacgtgggactgacctgccaatcctttaggtggggatggggcatgcttttgttcctcactgccttctaagtgatggtcaggtgcaccagagcatgtatgtggattggggtggggagaaccagtgagcatttacgaggctttctctccctccttcattgttttttttcccaagaggagggggtttgcttttctcagtgcctccaacatgctttctctataggatgcctttccgacttgaaggatatccaggtttaagaacaaagagggactctccccatcccataaaggtcaaattttagaccaaaatattcagtgtacaggcacctgtgagctgcagtctgtggcaaggtgctggatctcctgacgcaggatgggtacctttgtggagtagctgtggaaacctcacccatgggctgcccaactgtgatgatgtatagtcgtgtgttggtgttttgttttgttttgttttttctttaaactgtggcatcaggtacagaaaaaagtgttaattgatgctggtgtggtttgtgtaaacgacccatagcaatgacgttgggttgcttcctgggcccggctgagttgtggctgggtggctgagatagtaaaatgctgtcttcaagagtgaccagactgcaggctacctgccaaatcccctacacagatgcactttaagaagccgtttatgctttggctcaaactgtcattaatttattttatgtacaataaatctctcatttgataagaaaaaaaaaaaaaaaaaaaaaaaaa

SEQ ID NO: 541 - DNA, 3111 bp, Rattus norvegicus
gccctccttccctccctccctctactgatcctgtcccccactcccggattattaactcagcaaccagaggcgactggatctaccgagtcctggccaccgggcccgggccggggcgcccggagcgcttggggatcctgcaaggtgaccatggccttgctggggaagcattgtgacatccccaccaacggctgtgggtctgagcgctggaactccacctttgcccgcaaggacgagctcatcaacagtctggtgtctgccttagactccatgtgctcagcgctctccaagctgaacacagaggtggcctgcgtggcggtacacaatgagagcgtcttcgtgatgggcaccgagaagggaagggtgtttttgaatactcggaaggagctacagtcagacttcctcaggttctgccggggacccctgtggaacgatccagaagcaggacaccctaaaaaggtgcagcgctgcgaaggtggtggccggagcatcccgcggtcctctctggagcagtgctcggatgtgtacctgctgcagaagatggtagaggaagtgtttgatgttctttatagtgaggctatgggcagggccaccgtggtacctttgccctatgagaggctgctcagggagccggggctactggcggtgcaagggctgcccgagggcctggccttccggagaccagcagaatatgaccccaaggcactcatggccattttggagcatagtcaccgaattcggtttaagctcaggaggcctcctgatgacggtgggcaggacacaaaggcgctggtggagatgaacggtatctctctgctacccaaggggtcccgagactgtggtctgcatggccaggcctccaaggtctctccccaagacctgacccccaccgccaccccatcctccatggccaacttcctgtacagcacttcgatgcccaaccacaccatccgggaactcaagcaggaggtgccaacctgcccgttgacccccagcgacctgggcttgggctggcctgtgcctgagccccatgtccccagcacccaagatttctctgattgctgtggacaggcgcctgcagggcctgctgggcctctcatccagaatgtccacgcttccaagcgtatcctcttctccatcgtccacgacaagtcagagaagtgggatcccttcatcaaggaaatggaggacatcaacaccctgcgggagtgcgtgcagattctgtttaacagcagatacgcggaagccctgggcctggaccatatggttcctgtgccctacaggaagattgcctgtgaccctgaggctgtggagattgtgggtatcccagacaagatccccttcaagcggccctgcacttatggagtgccgaagctgaagagaattctggaggagcggcacagcattcacttcattatcaagaggatgttcgatgagcgcattttcacagggaacaagtttaccaaagaccccatgaagctggagccagctagcccaccagaagacactgccacagaagtctgtagggacagcatgctggacctggctgggactgcttggtcagacatgagcagcgtctctgaagactgtgggccaggaacctcaggagagataggaatgttgaggcctatcaaaatcgagcccgaggagctggacattattcaggttactgtctcagatccttcacctacctctgaggagatgactgactcactacctgggcatctaccctcagaagattccggttatgggatggaaatgccggctgacaaaggccccagtgaggaaccgtggcaagaagagaggccggcagaagagagccctggtgatgtgatcaggcccctccggaagcaggtggaaatgctgttcaacacaaaatatgccaaagccattggtacctcagagccagtcaaggtgccctactccaagttcctgatgcacccggaggagctcttcgtactgggactgcctgaaggcatctctcttcgaagacccaactgctttgggattgccaagctgaggaagattctggaagccagcaacagtatccagtttgtcattaagagacccgaactactcactgacggtgtcaaagaacctgttatggacactcaagagagggactcctgggaccctcttgtggacgagaccccgaagagacagggccttcaagaaaattacaacaccagactctctcggatcgacatcgccaacacgcttagggaacaagtccaagacctgtttaacaagaaatacggtgaagctctgggcatcaaatacccagtgcaggtgccctacaagcgaatcaaaagcaatccaggctcggtaatcatcgaaggcctgccccccgggatcccattccgcaagccctgcacctttggctcccagaacctggaaaggatcctctctgtggctgacaagatcaagttcaccgtcaccaggccatttcaaggactcatcccaaagcctgatgaggatgatgccaacagactgggggagaaggtgatcctccgagagcaggtgaaggagctcttcaatgagaaatacggtgaggccctgggactgaatcggcctgtgctggtcccgtacaagctgatccgggacagcccggatgccgtggaggtgaaaggcctcccagatgacatccccttccggaaccccaacacctacgacatccatcggctggagaagatcctgaaggccagagaccacgtacggatggttatcatcaaccagctccaaccttttggggatgtctgcaacaatgccaaggtgccagccaaagacaacattcccaagcgcaagagaaagcgggtctctgaaggcaactcagtctcctcctcttcctcttcttcatcctcctcgtcctctaatccagagtctgtggcgtccaccaaccagatctccctcgtgcagtggccagtgtacatggtggactattccggactaaacgtgcagcttccaggcccccttgattattagacctcagagccgaatcaggacctcaactcaaaagactaaaggaaaatgtaatttatgtacaaagtatattcggatatgtatcgatgccttttagtttttccaatgatttttacactatattcctgccgccat

SEQ ID NO: 542 - DNA, 2075 bp, Rattus norvegicus
cgttacctccggaagagccgaagaaccgatccctcggacgccagcggttgagcatcgattgcggtgcgctcgcgcgaaataatggcagacccttggcaggagtgcatggattatgcagtgatcctcgcaagacaagctggagagatgattcgtgaagctctaaaaaataagatggatgtcatgattaaaagttctccagccgacttggtaacagttactgaccaaaaagttgaaaagatgcttatgtcttctataaaggaaaaatacccatatcacagtttcattggtgaagaatctgtggcatccggggaaaagacagtcttcacagagcagcccacgtggatcattgatcccattgacgggacgaccaactttgtgcaccggtttccctttgtagctgtttcgattggcttcgttgtaaataaagagatggagtttggagttgtatacagctgtgtggaagataagatgtatacgggcaggaaaggaaaaggcgccttttgtaacggtcagaagcttcgggtctcgcagcaggaagacattaccaaatcactcttggtgaccgagctgggctcgtccagaaagccggagactttgcggattgttctctccaacatggaaaggctttgctccattcctatccatggaatccggagtgttgggacagcggctgttaatatgtgccttgtggcaacgggaggagcggatgcctattacgagatggggatccactgctgggacatggctggagctggcatcatcgtcatagaggctggcggagtgctgctggatgtgacaggtggaccattcgatttgatgtctcggagaataattgctgcaagtaatatagcattagcagaaagaatagccaaagaacttgagataatacctttacaacgagacgacgaaagttaggcacgtagaaccgcatccagctccgtcacacctgctctccctgggatgtttaaagatgtatgatgtcactgatttaaatttaactttgcagtcctgatttttaagcgggaacttttttttacagatgacatgttcaaaagtagatggaatatttgattattgaaagaaaatttgcatgtaataatatccttggggaaaatatacaggaagtataattaatgaactagccattgaaatagtccccagcccatatgatccctttcaacttaatttactatttatatgcacagttcttaactagaaagttttcttttttgtaagcggttttctctttgttccaaaagccatatttgattaagtctgtaaggctgtaaccagcaggctctccctgtgcagaaggccttcgtgttttattaatcactgtaatacagcacctagtgcagaaccagtcagacagtaggcgatctccaatcgacacctcacactgagtgcttgaagctgcaattcctgcttctaatgtgtcagaataagataaccattctactgtggcttcctgttttgaagtaaaagtttcctcactgtccttttacatttcatattgttgtgccatttcatagggccaccctgccagaggccattgcttctagttggcatttctgcagttagtatactgctgtgtgttgtaggttctgtttggagcccccacgctagagagaaatttccacagacgtcttccatgtacctggtgcagttagtggcagtgtgacgttttaggaaatgcagtatcacattcagatccataccgtggtgttggctggtgtgaactgtgtattgtggcgttcatggtgaactttttgatttctttcaaaacttgctgaatttcaccactgctctctttggctattctataaggtcttgggcctctcaaacacaagaaaatgcaatgactcctattccttttcaaaggattaattcattgtccagccttggcgcttggcataggagcagactttgttcttagtatgtttgaaccttgcgttggataaaatgaagtgttcttgtaaagttccaaggcagttattaccttgttgttggacgatttgatatattaaatctatatgatactccgaaaaaaaaaaaaaaaaaaaaaaaaaaaaaaa

SEQ ID NO: 543 - DNA, 1674 bp, Rattus norvegicus
cagaagcaggaggccgcagttttaggggtccggagagggtcttgagaaacagaggcaacgcgccaactccaagccagaagcgcgagcacctgcacagctccggggtcagacgagcgcaccggtccagcccttgccgcggagccccctgccggctcgttgtgggagccaccagaaggaagcagatcatcttacaactcggtgccatgatgctggccgcccgtctttccagacccctgtcacagctcccaggaaaagctctaagtgtctgtgatagagaaaatgggacaagacacacactgttgttttacccagcttctttcagccctgacacccgtcggacctacaccagtcaggcagatgcggctagtggcaaagctgtcctggttacaggctgtgactctggatttgggttctctttggccaagcatctacactcaaaaggtttccttgtatttgctggatgtttgttgaaggacaaaggcgatgctggggtcagggagctggacagcctgaagagtgaccggctgagaaccatccagctcaatgtctgcaacagtgaggaggtggagaaagcggtggagaccgtccgctccggcctgaaggatcctgagaagggaatgtggggcctggttaacaacgcaggcatctcaacgtttggggaggtggagttcactagcatggagacgtataaggaggtggccgaagtgaacctctggggaactgtgcgcacaacaaaatccttccttccccttctccgaagagccaaaggccgtgttgttaacatcagcagcatgctgggtcgcatggccaacccagcccgctcaccatactgcatcaccaagtttggggtagaggctttctcggactgcctacgctatgagatgcaccctctgggtgtgaaggtcagtgtggtggagcctggcaacttcatagctgccaccagcctctatagccctgagcgtatccaggccattgccaagaagatgtgggatgagctgccagaggtcgtccgcaaagactatggcaagaagtacttcgatgaaaagattgccaagatggagacctactgcaacagcggttccaccgatacgtcctccgtcatcaacgctgtcacccatgccctgactgctgccaccccttatacccgctaccatcccatggactactactggtggctgcggatgcaggtcatgacccattttcctggagccatctctgacaagatctacatacactgaagagctgaagaggtccctgcagcctctgccagggagcctgatgggagggagttcatacagttatcttttgattaaccattgtgggttgtccactgtcttaggaagacctattttaaccttacgtgttcaatgtggtgaatggtttgggccttcacaaatacagggcactggtgggtggccctaaccctcaaggccaatatggtgcttctatctgtctatctagagttgattttatataaagatttgtgggaaatacctttatattaaagacgttattagaatagaatccaaaatcattttcaagccagaacatccatccaaaatatgtatcccatttgatccttaagtaagtctgatgagtaaaaagaacagaatttttaaaaaaaaaaaaaaaaaaaaaaaaaaaaaaaaaaaaaaaaaaaaaaaaaaaaaaaaa

SEQ ID NO: 544 - DNA, 862 bp, Rattus norvegicus
cagccgcgttccggacggcagcgcgtgccccgagctctctgccttcccccgcccgtcagcccgagcccagcccgcgatcccagcagcagcccgcagagcagccccagcagcagcgccatggccgggtggaacgcctacatcgacagccttatggcggacgggacctgtcaggacgcggccatcgtaggctacaaggactcgccctccgtctgggccgctgtccccgggaagaccttcgttagcattacgccagctgaggttggtgtcctggtaggcaaagaccggtcaagttttttcgtgaatgggctgacacttgggggccagaaatgttctgtgatccgggactcactgctgcaagacggggaatttacaatggatcttcgtaccaagagcaccgggggagcccccaccttcaatgtcactgtcaccatgactgccaagacgctagtcctgctgatgggcaaagaaggtgtccacggtggtttgatcaacaagaaatgttatgaaatggcctctcacctgcggcgttcccagtactgacctcatctgtcccttcccccaccgctccctttggcttttgcacccccttctttccatacacacacacaccattattttttgggccattaccccatttcccttattgctgccaaaaccacatgggctgggggctggggctggatggacagatacctccccctacccataccccctcctgtgtgtgtttggaaaaaaattgtttttgggtttcatttttgttttactttttttttgttttgttcttttttttttttctgaataaaaaaagattctactaaaaaaaaaaaaaaaaaaaaaaaaaaaaaaaaaaaaaaaaaaaaaa

SEQ ID NO: 545 - DNA, 504 bp, Rattus norvegicus
tttttttttttttttttcctatagcatagtgtttattattccattatgtggaagacagtcaagataaactgctttttcaagatcgaaaaaatgttggccattacagttttctagtaaaagctagcaaagcccaggcaatattcagagatgtgggataattcaggttggagccgcccgtccacacttctacaagaacagacgttttgtgtgtttcctttcttttttgttttgttgttattgttgttttgaggtttttcttttctatgtatgtatgtatgtatgtatgtatgtatgtatgtatgtatgtatagacaggctttctctgtatagccttggctgtccgggaactggctggctttgacctcacggagatgcacctgcttctactcccaagtgctggtattaaaggcatgcaccaccactcgccattttgtttttcatttgaggcaaggtcttactatatagttttaggtgacttggagaccactgtgaaggtcaggctgg

SEQ ID NO: 546 - DNA, 1130 bp, Rattus norvegicus
gtggagcggctgccagccggggaacaggcgcggccgcggcgccatattgcggccctcagcggtcgccaccgagccatggctgagacctacgacttcctcttcaaattcctggtgattggcagtgccggaactggcaaatcatgtctcctccatcagtttattgagaataagttcaaacaggactccaaccacactattggcgtggagtttggatccagggttgtcaacgttggggggaagactgtgaagctacagatttgggatactgctggccaggagcggtttcggtcggtgacacggagttattaccgaggggcagctggagccctgctggtgtatgacatcaccagccgggagacatacaactcgctagctgcttggctgaccgatgcccggacgctggccagccccaacatcgtggtcatcctctgtggcaacaagaaggacctggatcctgagcgtgaggtcactttcctagaggcttcccgctttgctcaggagaatgagctgatgttcctggagaccagcgctctcacgggtgaaaacgtggaagaagctttcctgaagtgcgcacgcaccatcctcaacaagatcgactcaggtgaactagatccggagaggatgggctcaggcattcagtatggtgacatatctcttcgccagctgcggcagcctcgcagtgcccaggccgtggcccctcagccctgtggctgctgagacgtgcagagccagctcacctgttcttctggaccagccctgctcgaaggctggggctcagaaccaggccccaagaggccaggccccaatctgccccagtcccagaaaagttactccatcacccatccccctcccctggcctgctggggcctggctttggggcaagattgagccacaggggaaaggggaccccatacctgctgctgcttcctctgtcttggctaactctagtccccctccccgagcccctaaccatacctgaagaactcccaaagcttgagaccagggccaattggccccaacgtcctgcctggccccgctgttgcaagtctgtgttatttattacctggaggcctgttccatcctgtcccagtcctccataaagcattgtttacacctgtgaaaaaaaaaaa

SEQ ID NO: 547 - DNA, 1678 bp, Rattus norvegicus
cttcttgcccttgatctttcagacagagctctgtcctcttagtccggatcccagcagagtcgacagccatggagaagctactatggtgtcttctgatcacgataagcttctctcaggcttttggtcatgaagacatgtctaaacaggccttcgtatttcccggagtgtcagctactgcctatgtgtccctggaagcagagtcaaagaagccactggaagccttcactgtgtgtctctatgcccacgctgatgtgagccgaagcttcagcatcttctcttacgctaccaagacgagctttaacgagattcttctgttttggactaggggtcaagggtttagtattgcagtaggtgggcctgaaatactgttcagtgcttcagaaattcctgaggtaccaacacacatctgtgccacctgggagtctgctacaggaattgtagagctttggcttgacgggaaacccagggtgcggaaaagtctgcagaagggctacattgtggggacaaatgcaagcatcatcttggggcaggagcaggactcgtatggcggtggctttgacgcgaatcagtctttggtgggagacattggagatgtgaacatgtgggactttgtgctatctccagaacagatcaatgcagtctatgttggtagggtattcagccccaatgttttgaactggcgggcactgaagtatgaaacacacggtgatgtgtttatcaagccgcagctgtggcccttgactgactgttgtgagtcctgaggcacctcctgggattacattctctcccttgtccctccttatgaaccttttaaccccagcagatgttgtagatctgttttgtgaatatggcctttcacttctctgctctgtggtcctcagcactagagcatggaatttaaatgtaaggcttccagcatgtgcatcccactactctttatcaaagagaacctgacttacccacggtgtgtgtatgtgtatttaattaaaaaatttttagacataatccttctccctcacacagatgagaaaccagatgcacagaaaggagaataattttttattgtttttgtttcagaatgtcatattgaatggtgtacttatatcctttctatccctccctcttcaaatcctctactatcccccccaattctccctcgaattcatgatgtcttataattagccttatatgcacatacacatctatctatctatttatctatctatctatctatctatctatccatccatccatccatccatccatccatccatccatctatctatctatctatctatctatctatctatcatctatcagtaatccatcttactgattacatttagtgtttcttgtattttgttgaacacttgagactggataatctatcaggaggtctatccctgaagaaaacggattgtccttttctcagcagctgattacctctagctcttcatatatgggtgtggctttgtgaaatgtttctgtccatgttgcatgtcaactggaatcattgtgcaagtctttttttgggcaacccagagtgatggagcactgactacactgtgctcagaatcagttcttttctggaataaaacctgtacttgaactttccagattcatgaatcaataaagttacctttggcttgaacaaaaaaaaaaaaaaaaaaaaaaaaaa

SEQ ID NO: 548 - DNA, 2018 bp, Rattus norvegicus
ccccgagcgaactgctgaggatccgctgtctggcattctctcagccttttgtccgagccagagctgcattcagaggagagaggcccgctaaggagcagctggactcctgctgcgagccgaaagccccctaaggcagttgaggacctgggaaggaggctccctgctggtggcgcttctcctggtgcttccaatccgtgcgagactgaaaacggcggagcggctacgggactctcacaggagcaagctgcaacatgcaatcgtccgcaagccggtgcggacgcgccttggtggcgctgctgctggcctgtggcttgttgggggtatggggagagaaaagaggattcccacctgcccaggccacaccatctcttctcgggactaaagaagttatgacgccacccactaagacctcctggactagaggttccaactccagtctgatgcgttcctccgcacctgcggaggtgaccaaaggagggagggtggctggagtcccgccaagatccttccctcctccgtgccaacgaaaaattgagatcaacaagacttttaaatacatcaacacgattgtatcatgcctcgtgttcgtgctaggcatcatcgggaactccacactgctaagaatcatctacaagaacaagtgcatgagaaatggtcccaatatcttgatcgccagcctggctctgggagatctgctacacatcatcatcgacattcccattaatgcctacaagctgctggcaggggactggccatttggagctgagatgtgcaagctggtgcccttcatacagaaggcttctgtggggatcacagtgttgagtctatgtgctctaagtattgacagatatcgagctgttgcttcttggagtcgaattaaaggaattggggttccaaaatggacagcagtagaaattgttttaatttgggtggtctctgtggttctggctgtccctgaagccataggttttgatgtgattacgtcggactacaaaggaaagcccctaagggtctgcatgcttaatccctttcagaaaacagccttcatgcagttttacaagacagccaaagactggtggctgttcagtttctacttctgcttgccgctagccatcactgcgatcttttacaccctaatgacctgtgagatgctcagaaagaaaagtggtatgcagattgccttgaatgaccacttaaagcagagacgagaagtggccaagacagtattctgcctggtcctcgtgtttgccctctgttggcttccccttcacctcagcaggattctgaagctcaccctttatgaccagagcaatcctcagaggtgtgaacttctgagttttttgctggttttggactacattggtatcaacatggcttctttgaattcctgcattaatccaatcgctctgtatttggtgagcaagagattcaaaaactgctttaagtcgtgtttgtgctgctggtgccaaacgtttgaggaaaaacagtccttagaggagaagcaatcctgcttgaagttcaaagctaacgatcacggatacgacaacttccgctccagcaataaatacagctcatcttgaaggaaggaacactcactgaatctcattgtcctcatcgtggacagatagcattaaaacaaaatgaaacctttgccaaacccaaacggaaaaccgtgcttgcggaaaggtgtgcacgcatgggagagggattgttttttaaccgttctaactttccacacctgatatttcacgggctgtttacaacctaagaaagccatgggaatgaatgaagcctcgggaaagcacttagattcttagtcagcacttcagcacggctcttaaaagccctcactgcactcacagcccacttacatttaaaaacaagaactcaaactctattcaggggtttattatccagtcctatgaatctggatacaggaatgcatgacattgcaaaacaattcttaaagcaaagtttcaattgctcgatttgagacaaaaaacaaaacaaaaaaaaaa

SEQ ID NO: 549 - DNA, 3508 bp, Rattus norvegicus
ggcacgaggctcgctgcgggctccaggcttggccgcacttgctcaccagtggtgcgcccggggcttttgtggcttagccggcctgggctttgtgtccgagttctgctccgtgcctgcggcgcttctcccggtcagggattcccgaggcggcgtgcgcagcccccgggaccagcgagcgatcgagcgagcgcgccggcttgagcggtggcgactgcgaggggccgaggaggagagaaggagggggacgagatgccggagttcctagaggacccttcggtcctgaccaaagacaagttgaagagcgagttggtcgccaacaacgtgacgctcccggccggcgagcagcgcaaggacgtgtacgtgcagctctacctgcagcacctcacggcgcgcaaccggccgccgctcgccgcgggagccaacagcaaagggccgcccgacttctcgagcgacgaggagcgcgagcccaccccagtgcttggctccggggcctccgtgggtcgcggccgcggcgccgtcggcaggaaagccacaaagaaaactgataagcccaggccagaagataaagatgatctggatgtgacagagctctctaacgaagaacttctggaacagcttgtgagatatggagtgaatcctggtcccattgtgggaaccaccaggaagctgtatgagaagaagctgttgaagctgagggaacagggagcagaatcgagatcctctactcctctcccaacagtctcttcctctgcagaaaacacgaggcagaatggaagtaatgactctgacagatacagtgacaatgacgaagactctaaaatagagctcaagcttgagaagagagagccgctaaagggcagagcaaagactccagtaacactcaagcaaaggaggattgagcacaatcagagctattctgaagctggagtaactgagactgaatggacaagtggatcttcaaaaggcggacctctgcaggcattaactagggagtccacgagagggtcgagaagaactccaaggagaagggtggaaccctcacagcattttcgtgtagatggtgcagtaatttcagagagtactcccatagctgagactataaaggcttccagcaacgactccttagtggccaataggttgactggaaatttcaagcatgcatcttctattctgccaatcactgaattctcagacataaccagaagaacaccaaagaaaccattgacaagagctgaagtgggagaaaaaacagaggaaagaagagtagaaagggatattctgaaggaaatgttcccgtatgaagcctctactccaaccggaattagtgctagttgccgcagaccaatcaaaggtgctgccggccggccgctcgagctcagtgacttcaggatggaagaatcgttctcatctaagtacgtcccgaagtacgttcccttggcagacgtcaagtcggaaaagacaaagaagggacgctccgttcccatgtggataaaaatgctgctgtttgctctcgtggcgggttttttgtttttggtctatcaagctatggaaaccaaccaaggaaaccccttcactaattttcttcaagatactaaaatatccaactgaagaaatcatttcggcacatccgactcgatctcctgtttttaataactgtagaaaagcatctgtgtccacttgttggccgaagaactaaattgtgatttcacctcagtaaaggtagcgctgcgttggaaagcagacaggaagcttacctggatctcatttcaatgttttggactttggagatcacactgtgccatatgaataatttttttagctccagaacttttttgtaggctttatttttttaatgtggacatcttatttcacttttggggaaaatgcattgttttgtgtatttgaaaaataaggcaaaacatggtgatgtaatgtgaagctacacattaaatacttggaattcttacagaaaagatttatgacttattctctgctgagtaaaaatgttagaaatgtgaatggcgttcagtaagagaagcggtcacgagttgtgcttccttccatatgcagcggtttgtccgtggaaggtccagcaataagctcttctgggactcctgtcgtgcgtgtggtgtcgctggcgcacctgccacactgctcactagaatattttcatatcatgaaagtgctacgtcattaaagccctgagtacacttagttttccactgggatcttggagagcaacatagatacctgcttagggagcctttagctggctgcgcgcgtctaagagaccgagggctagctagaagctcccgttgggatcctgtgcttgtatttacggcaaagcatctatcccgtccatccagctcatcagactgttctgtaggtaaataagcatgggggtgtttgtttagagttagaaactaaacaccagtcccctccacttcagtccgattccattgtcgtcttttaaccaaaaaaaagttttcctggccagggatttttgttttgctttgttttagatggagttggggtgttgagatttttgtttgttttaggcatgtaattcctgatgtaatttgatttaaaagtataactgacttgcttttaaatcacatatatagtagctaatgcttaatttgtaatttcaaataaggtgggcattatggttctgtgtattcctgaagtgattaacgatatccttatggttgtcttttttagctgaaatttacctcatgtatggcttagatgatgttgcagtcgatttaaattttggtaaaaatcaagtacagcataaacatttttaactaaatcatttaagttgcaattttacagtcattgaccacaaagcacactaaaaatgtaaattatttttaataacatccggaatgtaaagacagttttaatttttacaaaggaggaagctgaatatgaatatctagaccagcacacaactttgacttaatgtttactgtgtttagcttatagatatgtcgtaggcatttgaagtaaacttctgccccagagaccagaacatggaccagaacatgtaggcctggtccgtgaggcgtgtggggagctgacttagatctgaagtgctttcctctcaaagacaagccacaaggggcatgttttactcaactttccctctctacagtgacagccatctttctttgttctcagacacagcttctcatattgctttcagtcatctgtttataattaaaaattgtgagaagccccatttgatgtttaaaaacaggggtgggggttaatctggcttcacatttctataaggtcgctctggatagggaagtgtggtccagtacagtgaaagtcggaccaggtaaaacatgccattttctttttaaaagcgtgtacttggtcttttgtctgtgtctgttttattccactagagtaaatgtgtccttgatgtaaatgcaaagcatttattaattcgtagatgtagactttacaatataattcaataataaagtaattaacctct

SEQ ID NO: 550 - DNA, 4775 bp, Rattus norvegicus
gaattccggattacagacacgtatgtcatatggatgttggagatttgaactcaggtcctcatgtttgggtggtaagtggttctaaccactgagctgtctcaccagtctcagtggggtacccacactgaccactctccgcccactcctgaaatgccctttgttctccccatccctacgctatctctgagagctcacccccatacccttctgttctcacacacagccttccaggcgtctctcagtgcctgccagccgaccccaaggcgaaggagcatgcagtgctcagcccggggagtcctcgaagcgaagacacctgcaccggatgcccctggcctcccgtgaccgcatcatgatgctgggccactcgtgtctttgagtcagtagaagcagatcttcatcagtccacatcaacaccggctaataaggaggaaaccactgccaagctccaggaacaccatgttctgcaggaagttcaaagatctcaagatcacgggggagtgtcctttctccttactggctcctggtcaggttcctacggagccaatagaggaggtggccggagtctctgagagctgccaggccactctgcccacctgccaggagtttgctgagaatgcagaagggagtcacccccaaagaaagacaagccgcaacagagtctacctacacaccctggcagagagtattggcaagctcattttcccagagtttgagagactgaaccttgcacttcagagaacattggcaaagcacaaaataaaggaaaacaggaattcttcagaaaaagaagaccttgaaagaataattgcagaagaagcaattgcggcaggtgtcccagtggaggtgctcaaagactctctgggtgaggaactgttcaagatctgttatgaggaagatgagcacatcctgggcgtggttggcggcaccctgaaggactttctcaacagcttcagcacgctcctgaagcagagcagccactgccaggaggcggagaggcgggggcgactggaagatgcctccatcttgtgcctggacaaggaccaggactttctaaatgtttactacttcttcccgaagagaaccacagccctgcttctccccggtatcattaaagcggctgctcgcatactgtacgaaagccacgtggaggtgtccctgatgcctccctgcttccgaagtgagtgtaccgaattcgtgaaccagccctatttgctctactcggtccacgtgaagagcaccaagccttctctgtccccaggcaaaccccagtcctcgctagtgatccctacttcgctcttctgcaaaactttcccattccacttcatgctggaccgtgacctggccattctgcagctgggtaatggcatcagaaggctggtgaacaagagggacttccaagggaagcccaactttgaagagttctttgaaattctaactcccaaaatcaaccagacatttagcggcatcatgacaatgttgaatatgcagtttgtcatacgggtgaggagatgggataacttagtgaagaaatcttcaagggttatggacctcaaaggtcaaatgatctacatcgttgaatccagtgccatcttgttcttagggtcgccgtgtgtggacagattggaagatttcacaggacggggtctctatctgtctgacatcccgattcataatgccctgagggatgttgtcttgataggggaacaggcacgggctcaagatggcctcaagaagaggttgggaaagctgaaggcaaccttggagcatgcccaccaagccctggaggaggagaagaagaagacggtagatctcctgtgttctatctttccctctgaggttgctcagcagctctggcaaggacaaattgtgcaagccaagaagttcaatgaggtcaccatgctcttctcagatatcgtagggttcactgccatctgctctcagtgttcacctctgcaggtcatcaccatgctcaacgctctctatactcgctttgaccaacagtgtggagagctggatgtctacaaggtggagaccatcggagatgcatattgtgtggcagggggattgcacagagagagtgacacacatgctgtccagatagcactgatggccctgaagatgatggagctctccaatgaggtcatgtctccccacggagaacctatcaagatgcgaatcggactgcattctgggtcagtgtttgctggagttgtcggagtgaagatgccccgatattgcctgtttggaaacaatgtcactctggctaacaaatttgagtcctgcagtgtgcctcggaaaatcaatgtcagccccacgacatacaggttactcaaagactgtcctggctttgtgttcaccccgagatcgagggaggagcttccaccaaacttccctagtgacattcctggaatctgtcactttctggatgcttatcaacatcaaggacctaattctaaaccatggttccagcagaaagatgcagaagatggaaacgctaacttcttaggcaaagcatcaggggtagattagtgagccgcatgtttctgtgtttgatgcctttgaggggtgctcagaatctctgaaatgactttaggattgcagaagataaaaaactgtgttaaaattgcaggggtgaaacccagtttcctctgtttcccatttaagatggaaaaaaaaaagtattcaatgcttcagcgctttcaaccttcttctctatttaagaaacaaacctcaaaagtgacttgtgacttttggggacatagctttgttctagagcagtcactacctgcactcgaaatccaacacagtgtacatattccagacaattgtagtcaagtttaagtgtcaaagtaatgtactcacctgtggcctgtgaccagtgcaaactgtggttattacagtgtgtctgtggtagtgttgcctgtaaatctctgaatagaaatgacagtgtttaattctgcaagagcttccagcctcttgactctacattcaattaggtttccttattctatcctggcgtatgtaacacaataggccagcgccttcttcccagctacatctttgtgcctatgtacgtgttttcctttcctttcctttcctttcctttttttttttaagaaaataagcaattagacataggataaaatgtgatataaagtagttcagtaagtgtcaaagaatattttcatgttttgtcattaaagatattatctatagcacaatatataatacaacaaatacttttcattttgatcctatctgtgataaaacattttaattaatagtaacaatgtactccctactaatccatgtaaaatttactaatagcaaaactttcagagtaaaagtatttacatacattgttaaaatgcaataacattcaaatttaattaaggcatagaattaatatttgcacacagagagcctactgtagaggacagtggcaaagtgttcacaaacacacgtgtttaaatgatcctctactgccgtgttgagccataaaagccaaggggaaaagttttaagttagaagtagaaaaatagacttcattttgtctttttttgataccttcttaagtatttctactgaccatttagtgtatgtgtatgtgttaagaatcaaaatttttattactcagtgtacacctgtgagtattattctactttaaatatactaatattttctacagaaaccactagtatcattgaagaaaatgtctatgatttcattatagagatcctgatacgtttttttttttcttctggagtttaaactaatgtcctttccttcccctgccctcctccgcagtcctctttcttcctctcccattaggcatgtttgtgtgattctgtgggctgacacaggaaactgtgcatgctgggtaaagactgttactgagtaacttcctcaccatgaggcttcagttttattgctaatggtgacagtttacattcccgagtgttaatttggtaaaaggaagtgactttaaaagaagaccaacttcaaagccaagagagatagacataattgaatttttcaatcagtattagtagaacgctagacattctgaatttctatgtgtgtagttgaaaagaaactcagtttaaaagtcattttctacctccaatagtcttcaagcatccagagcaacagacatcttttacctagctctagtttccaagggggacaactaaaccacccaatggatttctttaaaggcggatattgtctcattaaacagtcacactgatgttggatagtgtcacgggccctgcaaaggtgtatttaggatgtcacaatgatgtggaattcaatgaatatttattaaggaggtaaagaggtaaataccccctctttctggaactaatattcaatacaggggaactagtaggaatcacagacaattagaaagcgtaaaacaggatgtcatcctcttaagctgtgcagttaggtggttgctacattagtaataatctgattcagaagcttgcacattaattagaattaattctcccactgtcttttagggatggtgatagaactcaatgacaaagcacctgcctagcatttaggcagtcctgttctgacccaagcagcatgaaggaattacatgtatctctcatgtgcatatgatgtatgatcacactcacctgtgtcacctgtgtacacacctggggcaaatggaggaactgtatctaattcaaggcaaactaccggagctccatgtacggttcctataacttttctattattttgtcattttagcaaaaaaaaaa

SEQ ID NO: 551 - DNA, 554 bp, Rattus norvegicus
ctttccgccggggcagccatcttccagtaactcgccaaaatgacgaacacaaaaggaaagaggaggggtactcggtatatgttctctagaccttttaggaaacatggagtcgttcctttggccacatacatgcgaatctacaagaagggtgatattgtagacatcaagggaatgggcactgttcaaaaaggaatgccccataagtgttaccatggcaaaaccggaagagtctacaatgtcacccagcatgccgtgggcatcattgtgaacaagcaagttaaaggcaagattctggccaagaggatcaatgtgcggattgagcacatcaagcactcaaagagcagagacagcttcctgaagcgggtgaaggagaacgatcagaagaaaaaggaagccaaagagaagggcacctgggttcagcttaacggccagcctgcgccacccagagaagcccactttgtgaggactaacggaaaggagcctgagctgctggagcccattccatacgaattcatggcctaatgtatacaaaggaaataaagaacccgaactgc

SEQ ID NO: 552 - DNA, 1208 bp, Rattus norvegicus
gaattccgccccgcccgggctgagaaccatcttgttttccacgcagatccgcagggctacacgcgtcgtgtcccgggagcgcctcctttctcctcgcggccgctacaggcttggtaagcctttttctccctccggccggcaggctgggcgcgcaggggtgccggcccctgccgggcgcgcagtggcaccatgggcacggtgctgtccctgtcccccagctatcgaaaggccacactgtttgaggatggcgcggccaccgtgggccactacacggccgtgcagaacagcaagaacgccaaggacaagaacctgaagcggcactccatcatctcggtactgccttggaagaggatcgtggcggtgtcagcgaagaagaagaactccaagaaggcgcagcccaacagcagctaccagagcaacatcgcccacctcaacaatgagaacctgaagaagtcgctgtcgtgtgccaacctgtccacgttcgcccagcccccgccggcccagccgcccgcacccccagccagccagctttctggctcccagactggggtctcctcttctgtcaagaaggccccgcaccctgccatcacctccgcaggaacacccaaacgggtcatcgtccaggcgtccactagtgagctgctgcgctgcctgggtgagtttctctgccgccggtgctaccgcctgaagcacttgtccccaacggaccccgtgctctggctgcgcagcgtggaccgctccctgcttctgcagggatggcaggaccagggtttcatcacaccggccaatgtggtcttcctctacatgctctgcagggatgttatctcctctgaggtgggctcggaccacgagctccaggctgtcctgctgacctgtctgtacctctcctattcctacatgggcaatgaaatctcctacccgctcaagcccttcctggtggagagctgcaaggaagccttttgggaccgttgcctctcagttatcaacctcatgagctccaagatgctgcagatcaatgctgacccacactatttcacacaagtgttctctgacttgaagaatgagagtggtcaggaggacaagaagcgactcctcctggggctcgatcggtgagccccctgtagctggtatcctggctcaaggattccattcgtttttaaaatttattattaaagaatcaagtttgtgtacagtatgtgtctagcaga

SEQ ID NO: 553 - DNA, 2006 bp, Rattus norvegicus
gccggcgccgcagctgccgggcctctcgagtcggtggacgcgccctcccgccggcctcgccgcccgcgcaaccgccgtccttcggcctcggctgcgtcgcgccatggcggccccgggcgcccggcggccgctgctcctgttgctgctggcaggccttgcacacagcgccccagcactgttcgaggtgaaagacaacaacggcacagcgtgtataatggccagcttctctgcctcctttctgaccacctatgatgctggacatgtttctaaggtctcgaatatgaccctgccagcctctgcagaagtcctgaagaatagcagctcttgtggtgaaaagaatgcttctgagcccaccctcgcaatcacctttggagaaggatatttactgaaactcaccttcacaaaaaacacaacacgttacagtgtccagcacatgtatttcacatataacctgtcagacacacaattctttcccaatgccagctccaaagggcccgacactgtggattccacaactgacatcaaggcagacatcaacaaaacataccgatgtgtcagcgacatcagggtctacatgaagaatgtgaccattgtgctctgggacgctactatccaggcctacctgccgagtagcaacttcagcaaggaagagacacgctgcccacaggatcaaccttccccaactactgggccacccagcccctcaccaccacttgtgcccacaaaccccagtgtgtccaagtacaatgtgactggtgacaatggaacctgcctgctggcctctatggcactgcaactcaacatcacctacatgaagaaggacaacacgactgtgaccagagcattcaacatcaacccaagtgacaaatatagtgggacttgcggtgcccagttggtgaccctgaaggtggggaacaagagcagagtcctggagctgcagtttgggatgaatgccacttctagcctgtttttcctgcaaggagttcagttgaacatgactcttcctgatgccatagagcccacgttcagcacctccaactattccctgaaagctcttcaggccagtgtcggcaactcatacaagtgcaacagtgaggagcacatctttgtcagcaaggcgctcgccctcaatgtcttcagcgtgcaagtccaggctttcagggtagaaagtgacaggtttgggtctgtggaagagtgtgtacaggacggtaacaacatgctgatccccattgctgtgggcggggccctggcagggctggtcctcatcgtcctcatcgcctacctcatcggcaggaagaggagtcacgcgggctatcagaccatctagcctggtgggcaggtgcgccacagacgcacacgggcctgttctcacatccccaagcttagataggtgtggaagggagggaggcacacttgtggcaaactgttttcaaatctgctttatcaaatgtgaagctcatcttgcaacatttactatgcacaaaggaataactattgaaatgacggtgttaattttgctaactgggttaaatattttgctaactggttaaatgttaatatgttaccaaagtagagctctaaagaggacaagaaggctccacgcatttgacttttaagacttggtgtttggttcttcattcttttactcagatttacgccttacaaagggaatctctggtccagacacttgggcctggcaagggtggctgatggtggttaggctgcacacttgagaagcaaacaggagcagggacgtcctgccacacaggcacgcacagggtcagcctctggacacttggcttgggctgcctggcctggggggctagactctggcatctggctgggcacacccaccagtgtttctgtgctctgccgcctgtgagctaccactttcctaaatagaaaatggcattatggggttggggatttagctcagtggtagagcccttgcctaggaagcgcaaggccctgggttcggtccccagctccggaaaaaaaaaaaagac

SEQ ID NO: 554 - DNA, 393 bp, Rattus norvegicus
aaggtgaaacctctaggaacaaggagtcccattcagagggcacgagagcccacggagcctcctcagatctcatagtgaaccacgggctcaggttctttggaaggatcaccgcctcgctccaggtacagattattgtacgggtactgcttcggaccctaaggaaggacacaagagaagagaaggtgcacgtgtcagcaagaacaatagccagccagtcagccaatacctgactacaccctacttgagttcacaatcacgcagagcaaaagggggtacagtagcctctggtcagactccgaggagctaaactggcagaaggatgctcttgccctgctcaacccacagcagagagcgcctcagttatgagagaagtagtgtctgccggcaagtgag

SEQ ID NO: 555 - DNA, 1035 bp, Rattus norvegicus
atggtctgcgccaggcaccagcccggcgggctctgcctcctgctgctgctactctgccaattcatggaagaccgcagcgcccaggctgggaattgctggctccgccaagccaagaacggccgctgccaggtcctgtataagacagaactgagcaaggaagagtgttgcagcaccggccggctgagcacctcgtggaccgaggaggatgtgaacgacaatactctcttcaagtggatgattttcaacgggggcgcccccaactgcatcccttgtaaagaaacgtgtgagaatgtggactgtggccccgggaaaaagtgccgaatgaacaagaagaacaaaccccgctgcgtctgtgccccagactgttccaacatcacctggaagggtccagtgtgtgggctcgatgggaaaacctaccgcaacgaatgtgcgctcctcaaggccagatgtaaagagcagccggaactggaagtccagtaccagggcaaatgtaaaaagacttgcagggatgttttctgtccaggcagctccacttgtgtggtggatcagaccaataatgcctactgtgtgacctgtaatcggatttgcccggaaccctcatcttcagagcagtccctttgcgggaacgatggtgtgacttactccagtgcctgccacctgagaaaggccacctgcttgctgggcagatccattggattagcctatgagggaaagtgtatcaaagcaaagtcttgtgaagacatccagtgcggtggtggaaaaaaatgcctatgggatttcaaggttggcagaggtcgctgctctctctgcgatgagctgtgcccggacagtaagtcggatgagcccgtctgtgccagcgacaatgccacgtacgccagcgagtgtgccatgaaggaagctgcctgctcctccggcgtactgcttgaagtgaagcactccggatcttgcaactccatctcggaagaaacggaggaagaggaggaagaggaagaccaggactacagcttccctatctcttccactctagagtggtaa

SEQ ID NO: 556 - DNA, 430 bp, Rattus norvegicus
tttttttttttttttttcatgcagtttctctttattgaaaggcctgaacacaaaggcaagctgggacagcagaaagaaggcaggacattcctcatactgctctgattcctagagtaccactggaggaggaaaaggaaatccacattgattgccctggcttgccccatactcagggttccatccgaggccaatcattgccagatctggctgcttgctccgtgtctgcactgcacgcttgggcctcaggcctcgatcagcttccctaagaagcggaggtttagaatcttgatctgctggtcttccaggtccattcggctgatgccatcctcaccatcagtactcagaacgacccccgtacccactcggtcctcacccagaatcactttcaccttgttgttcttggtagcggtcatgggctccagatgctcac

SEQ ID NO: 557 - DNA, 576 bp, Rattus norvegicus
  misc_feature (1)..(576): n = a or c or g or t
tttttttttttttttttagtcagtactgcagcagctccgagtttaataattctcataggctctatataccttacagtcttgggaaacaaagtcacaagccagcagggtcaatggctgatggacattggacatctgtacctatctggaggcctccttgttccttcctccaagattaagagcattcagcccctcaccttgagcttcaagcatatcgcctcttacccttcatgagtcagcaggccagaaaatctgccagcagaccctggcctgacttgactgcctgataggcaggatttcacagaagcaggcaaaatggctcctgacagagagatgccagctagaaagggagtttgctttatttgccattccctgtanggctggtgtcctcaatgagatgcaggctttgggagttcctatacacctcagtgctctgtagaagctgaggacccttgacctcacaggtgtgatcactctgcangtggagatgtggccaattggttgggtgtcctcactcttgaagcaggtanggtccccatagagatcctcagatgtcagcacccagctctgcacactgct

SEQ ID NO: 558 - DNA, 476 bp, Rattus norvegicus
tttttttttttttttttgccagcccattggccactttatccgaaaagctcatagcaccatacacgaaggctccactgtgctgggggtacacaccacaccgggttagtgcccaggacaggatccaaaccacgcccccaagctcctaaccacgcccccaggcgcctcccatcagccctaccgtatgggggccaatgaggtcagcggtcatggctagggaggtgacaaggatggtggcacagcctgcacccaacagcaatgcggccccatatacggccacacccaggttatctgccagggccacccaagctgcaaaggccaggatcaccagcagcccggtgaagtaggtcatgtttctccctatgcgcctgttgattggcttcatgaggaaggaggagaagaagccactcaagtacatcaccagggggatggtggcaatgaacttcttgggcaggctgagagaataggtcagatacatg

SEQ ID NO: 559 - DNA, 1770 bp, Rattus norvegicus
gctacaacgccgagcggaggaggtaggaacctgatttccagaagcagctgggtaggcaccatggccgggagcaccaccatcgaggcggtaaagcgcaagatccaggttctgcagcagcaggctgatgatgcggaggagagggccgagcgcctccagcgggaagtggagggagaaaggcgggcccgggagcaggctgaagctgaggtggcctccttgaaccgcaggatccagctggttgaagaggagctggaccgcgcccaggagcgccttgccactgctttgcagaagctggaggaagcagagaaggttgctgatgagagtgagagaggtatgaaggtgattgaaaaccgggctctaaaagatgaagaaaagatggagctccaggaaatccagctgaaggaagcaaagcacattgcagaagaggcagacaggaagtatgaagaggtggctcgtaagttggtgattattgaaggagacttggaacgcacggaggaacgcgccgagctggcagagtcccgttgccgagagatggatgagcagatcagactgatggaccagaacctgaagtgtctgagtgctgctgaagaaaagtactctcaaaaagaagacaagtatgaagaagaaataaagattcttactgataaactcaaggaggcggagacccgggctgagtttgctgaaagatcggtagccaaactggaaaagaccattgatgacttggaagataagctgaagtgcaccaaagaggagcatctctgtacacaaaggatgctggaccagaccctgctggacctgaacgagatgtagaccttccccatccctgccctgccctgcggccgctcctccctctgaccttgactccgcctgaggccagcctccctgaagctggcttgaaactgagggctgatctttttaactgaaggctgctttccctcctgccacccctcttacccctcttgtctttttcatcaaaactgtgtcagcctcttcccagagttccagctggagggtctgaacactctttgggaatcaatatttaagggaatgtgagcacagcgcaaagtgtcctcaatgcagttgtgatatgcacattgtgattactttttgtcttagcaaccattttaacattccaagcacttggcagcttggtgcagcacatcttagcctaatggataccgtctctccatggaggagaaacacaggaatgggcctgcttactgagagccagcagagcccaggcagactccactgtggagacctcagtgctctgtaccaagtcttagccaaacaacagggttctaggaagttagccaaaaacaaaaaccattccggtctgtgaaggaaaacagctttgatatctttgaacaactttacacttatttttagttttgactttttccgtccgatgtgaccaaataggagagtgagacatctgagacgcccccgcctcccagggcccttgtgcatgttaggccagcgtgctaccgttcacccccagccctgagcccgaacttgtctcagctctacccctttcccaactgctcagaaatggatcatgctgccccttagtgttgtggtgacctcttagtgttcacctgccccaagggagacggaaaaggaaattatgtttgtgccactgatttagccacatgaaagtcatctcattgctctttcctgaagctgctgtctctaaagtgccatctctttgtgctttgtatcagtcagtgctggagaaatcttgaatagcttatgtttaaaaaaaaaaaaaaa

SEQ ID NO: 560 - DNA, 406 bp, Rattus norvegicus
tttttttttttttttttgtggttcacactttattgcaaatcaaatgggtccttcctggggaccagggcagcacagtgagatctaatctctcaggccaggctggggattcaggggtctggtacagtcctccgaaaatcagtgagggaagggttggatgcagggcagagacaagggagggggtaatttgcgcgcctgctgccttccttggatgtggtagccgtttctcaggctccctctccggaatcgaaccctgattccccgtcacccgtggtcaccatggtaggcacggcgactaccatcgaaagttgatagggcagacgttcgaatgggtcgtcgccgccacggagggcgtgcgatcggcccgaggttatctagagtcaccaaagccgccggcgcccgacccacg

SEQ ID NO: 561 - DNA, 309 bp, Rattus norvegicus
atggcagggaaagaattggagcgatgccagcggcaggcagaccaagtgacggaaatcatgctcaacaatttcgacaaggtcctggaacgcgatgggaagctgtcagagttgcagcagcgctcagaccagctcctggacatgagttctgccttcagcaagacaaccaagactttagcccagcagaagcgctgggagaatatccggtgccgggtctacctggggctagccgtggctggcggccttctcctcatcctggttgtgcttctggtcatctttcttccgagtggagaggacagtagtaaaccatag

SEQ ID NO: 562 - DNA, 433 bp, Rattus norvegicus
tttttttttttttttttaagtgtttatgaattttattatgactgtgtttgtttaaatatatatatatatatttatagctctatgcatcccccgcaccacccccccaagcccctagttcttgcccttagctttctgtttggtggctgtgtagggcagcactgtctgcgtgctcttgtctgatactgtctgagtgctgctgttccttgtgaccctccgggtctgttctggggccaacgtggggacacaggagggcaaggggaggggccttgggcccaagaacagcttccaggacttgaagtgccaatggtgtacagagctgatctttgcctgaatctggatgcggaggcagggggatgattctgcaaggactaagggtaagagatgcccttgggatgggggaaggcatcaatcccctcgcaactcctaggcagtt

SEQ ID NO: 563 - DNA, 374 bp, Rattus norvegicus
tttttttttttttttttgcgttcagcccaggacgtgactttattggggatatgggtccctgactccgcttcaccgtcgttccctcccccacagcgcgggcccagaggggcctcgaacatctgactcggtctcctggacaggaagtgactggggaggagggggcgaggcaagtatttttgggcgaccagatgttcatctccatccccaccaccagtccgtccgggtgccaggctgggagggtgcacggaggtcgccgagaggcaaaggggtgagcccttccctgggagctatgggggagggaccgagccgccgccaaccgaatgctttctcagcgctgaggggctgtggggtcactcgcaggccagcttcccgtc

SEQ ID NO: 564 - DNA, 3052 bp, Rattus norvegicus
tcagagttccgcgcagaaccttccagtgcccagccatacttcaggagtgccctgtccccttagtcgtggctgcaggcgtggagccatgagctgtcttctgaacaatatggtcccggtggggctggctccgctggtctgcggagtacaggcctttttccttcccaacaccatgagcctggagaggctgctcagcaagtaccagcacacagagccacactcacgcgtgcgcagggccatccccatgtcagaccgtcagaaatcctcatgctgcacaacaagctgcgaggtcaggtgtatccccctgcctccaacatggagtacatgacctgggatgaggagctggagaggtcggcagccgcgtgggcacagaggtgcctgtgggagcatgggcccgccagccttctcgtgtccatcgggcagaacctggctgtgcactggggcaggtaccgctctcctgggttccacgtgcagtcgtggtatgacgaggtgaaggattacacctacccgtacccccacgagtgcaacccatggtgccccgagcgctgctcaggagccatgtgcacccactacacacagatggtttgggccaccaccaacaagattggctgtgctgtgcacacctgtcggagcatgagcgtctggggagacatctgggagaacgccgtgtatctcgtctgcaattattctccaaagggaaactggattggtgaggctccctacaaacatggccgcccctgctctgagtgtccgtccagctatggaggtggctgccggaacaacctgtgttaccgagaagagcactaccatcagaaaccggagtggatgagatgaacgaggtggaatcaccccctgctcccgaggaaacccatgtctgggttcaacccagggtggtcaaaccctcaaagaccaagaagaccccagtcgtcaacttcatgacccaagtggtccactgtgacacaaagatgaaggactcatgcaagggatccacatgtaacaggtaccagtgcccagcaggctgtctgaacaacaaggcgaaggtctttggctctctgttttatgaaagttcttccagtatatgtcgagctgctatccactatggtgtcatcgatgatcgaggtggcctggtggatgtcaccaggaatgggatggtacccttctttgtcaaatctcagaaaaatggcttgaagtccctgagtaaatacaagccgtctagctccttcactgtgtccaaagtgaaagagacggctgtggactgccacaccacagttgcacagctatgccccttcgagaagccagccacccactgcccgagagtccggtgtccttcacgatgtggagaggagccatcctattgggcccctgtgtatggaaccaacatctacgctgacacttccagcatctgtaaggcggctgtgcatgcaggcgtcattgtcgacgaggttggtggctatgcagatgtgatgcccgtggacaaaaagaagagctacgtgggctccctcaggaacggggttcagtcagagagcccgagcactcctcagaacggaaacgacttccggatcttccccgtcaggcagtgaatatggagacctggggagaagggggtgtcgtctactgggattcgggggtcctgctttttatctgtactttgtcctttgggggtgggagggtaacagagagtcaagaatcttcctttcggtgtcgttgactgtcctgggcctccgtggcttttggtgacggtgacagagcaccttcccctcgtgagcagcatgccgtggagtctcttgctggacaaccagtgcccagactggccaggtggcggtccccatctggtggctcatctcctctcaggagatgctcaccgagacactctttgccacattttctttggtgttggaggggggaaggctttcgaactcttgaggatacagggtggagattcgttgtgaagggggctcttgtctggatgacaagagtggacagccctaaggttacagtccgtcctaccaacagagaaatagggtctgtgtttgctggtcagacagatgggctgcagggagaagccctgggcaaaacctgggctctgccctggtggtatccgtgctcatgtccccaaccttcttggcagtcacgtgttcgtattgacagcagagctggtctatttaaagttggtagcactccagagatttatcttttctttgtccttgtccttgtccttgtggcccgttttcacatgacctttggtctcatggaagaccagtgcatcaggagccttccccaccattccgtgtccctgtgtcgagcatctgccccaccccaaggaggtctagattgtcctcctttggggcttggctttgtaagaggctccaggtcttagatgtctgcttactccttagaacaagggctctctcacggttgctgttagagtggcagctcgacatcgcttccccatggtttgggtgacctagtttttagctgtgggaggaccggattcctggcgcattcctcctgggggttaatggagtgacctgtggttgtaaaaccacccatgacacaccagccaccagagagagaggggcagggacacacaggaagaacccctcagcgcttgccagagtcccgggctccaagagtgtggtgagtcctggcttccatcacttaggagcctggtccaaacccgctgtaaaatgaaacctgcttttgtaaacagctttctctagagaaggtggaatcccaccccagtcctggggatggggcacagttgcctgtgaatgttggcctcaaacagggtttcatgatccagccaaacatttcttagacaaaagaaagggggtgggagtagaaaataaaacagaatgctgtcccccagttgaaaggctggggaggtgacttggtgattaacagctctaccagaggacctgagctcagttcccacgactcacagactataactataacccacctatgaccaactctaggagatccatgatctccacagacgccacacgcatccacatgagcaaaagtacaaatggtcctaaaaaaaaaaaaaaaa

SEQ ID NO: 565 - DNA, 478 bp, Rattus norvegicus
ttttttttttttttgctttctagatacaaggtctcatataactcagactggcctggaacttattacgtagctggggctaaatttgtattcaggacctcctgtctgcacctcctaatgctgggatttcagacagggttttctctctgaagccctggcattcccggaacttagtatgtagaccagccttgaactcacagagatctgccttactgctggatctaaggcttacaccacaagtttttaaatttatgtttaaataaaaattaaatgggaagtctgaagattacagaaaggtagtcggggaaatttttcttgcatcttttgttttgctttggtttttggaaacagtcttgggactggagcgatgactcagcagataagagccatcttccagggctgttcttccagaggacccaggttaattcccaggtcacacgtggtgacttatggctggcgagctctaatttctgggctctcc

SEQ ID NO: 566 - DNA, 283 bp, Rattus norvegicus
tttttttttttttttttgcgactttgaaagattgtaatatattctgtggaaaacattcggcagagcaaaagccctccctgggccctcccgcagtatgcaaccagtggaacggtctggaaatctgcagctctggaaaggtccctggctcagtccttgaggaatgcaggcagctatatgggaagaacctgctccaggatggttctggatgagatggggatcctatcagggaagatgacttcaaattcgataacaaggtctccacgtttctcaggtgttttgggga

SEQ ID NO: 567 - DNA, 371 bp, Rattus norvegicus
tttttttttttttttttaagagcttagaaaatttatttttttcttgaaatgacacacatgggcagggaggtaggacttggtgtaggttggtggaaaccgtgtcccccagcatcccagttttcctctcagttctttgatgagaggtctcctaaagactgggaggcggagcggagagctcccagttctaagcttggaatctaacttgaagtgcggagggtatggggatgtggtgggagccatgggactttgttctctggtaaaaccaaaaaatcaaaacaacaaaactccgagtcagctcggggatacttaatttgcatattggatgctgggtttcaggaaggatgttgtgtgttggtccttgcctcgtgccg

SEQ ID NO: 568 - DNA, 454 bp, Rattus norvegicus
tttttttttttttttttaagttttatttaaaaaaccttcggtgcaatattaaaaagcaatacagccaggtggaacagtcgacagacagaaagggaaggagctagaggacccaaggtcctttacctcacctgttccccagaagctgggggtcaagggggagggtctgggggtggtgggacgaggaaaaaccaccaccaggatgaataggtagaacaaaacacatataagatacatctggctgaactgaagaggggtttggggccacaggaagctcccctggtttttgttgttcaaaaatgtcctggtttggggagaaagggtgacccctggcaaatgagccagccaagtcgtccgaccccacactccactgctgtggagaggggtgaactaaggtcacgggtgtgagaaaagggggaaaatggagaagggaatcccctcactggagtctgttagg

SEQ ID NO: 569 - DNA, 493 bp, Rattus norvegicus
ttttttttttttttattgatacggtttctctgcagccctggctgtcctggagctcgggcaccagactggcctcaaacttacagagctccacctgtctctgcctcccaagtgctgggattaaaggtgtgtgccaccactccttagttgatgtgaatcaggcaccggcttgcagggctagccatgaaagtctagcagcctcttttgcactacaaggtccatgctgatggacccaacagtctggggctagtgaggtcttacgtccaaacacttccttcttactccgtgacagggtttacctggatcagcgaaagtctgctccagcactcgaaggagcaggtccaccgcccttgggacaccagcctctttagacgctaagcgttagccataacatgcttcttcagaagaggcctgtagaagaggtgctgtggtgatgttagcagacacctctctgtgctttcaagccgcttgtcaataaagtgtctttgggggctgg

SEQ ID NO: 570 - DNA, 531 bp, Rattus norvegicus
tttttttttttttttttggtagtatagcaactcatttactctgaacatttattacacatttacgccaaatatattttagtaattgttgatagggaaagttcttaaaaaacaaaatgacaacaaaaacccaagagatgcagcaaagatagaattataaactcattacaattcttaacaaaaacagatccgtgccacacaacaatcattgaaatgtctaagccactaggcaacaggtaagctttaaatgttggttcctcacaactaacttgggatccagtgccttcctcttgccttcagtaccaggcccagaccacacggagcacaggtttacatgcatataaaacactgataacgcattaatgggaaattttaaaggatgaaacaactatttagcagttctttaattcactgtcacataaagttgaccctaaatatttagaatattctgtttaactctccatctattgttatccaaaaagtgatagtaactgcagaccagggacactaagctagctcaagaatatagcatag

SEQ ID NO: 571 - DNA, 435 bp, Rattus norvegicus
tttttttttttttttttggcctagtgccctatcccttacgttctttaagaggccctggcaagcccttagtggaggtgccatgactttttcagagtccatatgcatgcagccaagggttgtgagctgtccctgagataggacagggcccactccctgcctctgcctcactctgcactcaggctaagaaggggagggtcaccacagacaggagtgggggccattatgtagcacagcaatattctagatgttggcaggtgtcactgctgccccagagcaatggcttaatcttcacgtgtgtggtataggatcaggcactgggcacttgaccttggggtccatgggcaagatgagttctgattgtgcactgtccggcccaatctagggccacctttatggtggttgatcactctgaagatatgggtggcaagatgagtt

SEQ ID NO: 572 - DNA, 458 bp, Rattus norvegicus
tttttttttttttttctgaagtaaatagagacatgtagagtcttccctccatgtcaggctgcacttcattagccccagctcagtaatgcagggaaccctagtgacccatcggccaagaaactcccagaagcattaaaaaaaaagttatattccgctgccaagtggatagtcatttagctgtttgtcccttgttttttatttattccataattatgtttgtgctttttcttgtgtgaacagtagtgaggcgtatgtttttatgtggctttagagaaaacttcagtcttcaaagaactgttctaattagttccttctcggaaaaagttatgcgttaatttgtttcaaaatatttaggcattctttgaattataaacttgtgatgcagggatttgtgaacgagacgttcacaagtgaagatgacttcacttagcatctgtgtaaacagaataagatgtgta

SEQ ID NO: 573 - DNA, 346 bp, Rattus norvegicus
tttttttttttttttttgacctgtaactctgactttaatggtgtctcatgtttggagcagctggaagcttttgctcccatgccatccctgacatgtttctctagaaccacacagaggagcccagccctccccaggggcccctgtgttcaggaatccctaggtggggcccctaggaggtaagccacagtatttccaagaaggggctggggaaacaccaaacaaagagagaggcccatttatcttggagtaaaaccagagccttgttcactgttgggatacaggggctggggtgctgggggagatcagaccccccacagacccatctagcccactgtgctgcagccca

SEQ ID NO: 574 - DNA, 472 bp, Rattus norvegicus
  misc_feature (1)..(472): n = a or c or g or t
tttttttttttttttttggtttagcaccatttatttgtgatctcagctgttgtagtagttgctgctgtcagcctgttctcaaaggtaacatgctcttccgttcctcttgtccaggacagaagggtcttccaggtggcacgccaacagaacaagagactccgatgacgccagcttcaatgatggtgccatccagagagggagagtgtcatggcacattcaatcgcggcttccagaggttttgaaaaaggagcctttgggggcccagcctgcctggcattttgatgctgtcggtgtgagttttgtattccataatggtgttgggaggtangttaagcacgcgccgaagagtgtcccggattcgggctgtggttgcttggtcgctggcagtcttattccatatagaaataatgtcctcctggaagcggacagagaccacagccccgcagatttcctccccaaccatgaactgttc

SEQ ID NO: 575 - DNA, 2491 bp, Rattus norvegicus
aagcgccagcctagagagcagccagccagtgtggggttggccatgtaagggccccaggaggtcctgcccgtcccgtgccctgcggaaagcctcgtgcagccctgggcaccgcccctgccctgccctgaccccttggcctcaaaatgctgtcatcggaggagccgtcccgctcgggacaaggccaggatggacaaagctagagcttgggcaggcgaggagccatcctgtcctcgaggccgtgggaagagaagcacgcaccggggcccactcctgagagcctctccgcccacccggcctctgcagaagggccactatggctctggccggagccggcagccagctggggaccctggtgtggggagcctgcctgtgcgtcctggtgcacgggcagcaagagcagccaggacagggctcggacccaggacgctggcggcagctgatccagtgggagaacaacgggcaggtgtacagcttgctcaattcgggctctgagtacgtgcctgcggggccccaaagaggggagagtagctccagggtgctactggcaggcgcgccccaaacgtcgcagcggcgcagtcagggaggaccccggcgtcggcaggcgccgaacctgcccctgcccggacgcgtgggttcggacactgtgcgcggccaaacgcggcacccgttcggcttcggccaggtgccagacaactggagagaggtggccgtcggggacagtaacgggatggctcgggcccgcacctccgtctcccagcaacggcacgggggctccgcctcctcctcggtttcggcctcggccttcgccaccacttatcgccagccatcctcctacccgcagcagttcccctatccgcaggcgcccttcgtgaaccaatatgagaactatgaccccgcgtcgcggacctatgaacagggctacgtgtactaccgcggtgcgggcggaggcatgggcgcaggggcggcggcggcagctgtagcctcggctggggtcatctatcccttccagccccgggcacgctacgaggagtacggcggtgggggcgaggaacagcccgagtacccggcgcagggcttctacccagccccagagaggccctatgcgccccagccccagcctcagccccaacctcagccgcagcctcagccccaaccttccgacggccttgaccgtcgttactcgcatagcctgtacaatgaaggcaccccgggattcgagcaggcctaccctgatcccagcaccgacgtgtcgcagatccccgccggggccggtggcacctacggtgccgctggcgatccccgtctcggctggtacccgccctatgcagccaatgtgcctcccgaggcctatgtccctccgcgtgcggtggagccgcagcccccattccgcgtgctggaaccaccttacttgcctgtgcgaaactctgatgcgccctcccagggtggggagaggaacggtgcccagcagggccgtctcagcgtgggtagtgtgtaccgacctaaccagaatggtcgcggcctccctgacttagtcccagatcccaactacgtgcaggcatccacatatgtgcagagagcccatctgtattccttgcgttgtgcggcagaggagaagtgcctggccagcacagcctatgctcctgaggccaccgactatgacctccgagtgctgttacgattcccccagcgtgtgaaaaaccagggcacggcggacttcctccccaaccggccacgccacacctgggagtggcatagctgtcaccaacattaccacagcatggacgagttcagccactatgacctacttgatgcatccacgggcaagaaagttgccgagggacacaaggccagcttttgcctggaggacagcacctgtgacttcggcaacctcaagcgctatgcgtgcacctcacacacgcagggcctgagtccaggctgctatgacacctacaatgcggacatcgactgccagtggatcgacataacagatgtgcagcctgggaactacatcctcaaggtgcacgtgaaccccaagtacattgttctggagtctgacttcaccaacaacgtggtgagatgcaacatccactacacaggtcgcttcgtctctacaacaaactgcaaaatcgtccagtcctgatctcagtggacggagccccccttgtctccccttgaaaagcaggacctgcttccaggcagcctcccccaagaagcatagccgcctagccggagggcgagggcagctggccgctggggcatccctccctgccggcctcagggagtgaacatggaccaaacccacagggattctggatgccagaccccgttttgtacctaagtctcctctacaacaccattttgtctgttgttggttttaattttgatgttttggccatcccacacagcaagattgcccgggtgcttaataaaacaagggttttctagtctggaaaaaaaaaaaaaaaaaaaaaaaaaaaaaaaaaaaaaaagg

SEQ ID NO: 576 - DNA, 937 bp, Rattus norvegicus
ccgcgcggccgcctccgcggctcccggaacgcagaagctggtgtagggaggcgggcagtgaaggctccgaggcttgttcacattcggggaagcagaaaattgcctcatagttactaacctaacatggctgaccagaggcagcgctcactctctacttccggggaatcgttataccatgttcttggactggacaagaatgcaacctcagatgacattaaaaagtcctatcggaagctggccctgaaatatcaccctgacaagaaccctgataacccagaggctgcagacaagtttaaggagattaacaacgcccacgcaatcctgacagacgccacgaaaagaaacatttatgacaagtatggctcgctggggctctatgtggctgagcaatttggggaggagaatgtcaacacctacttcgtactctccagctggtgggccaaggcgctgttcgtcgtctgtggcctcctcacctgctgctactgctgctgctgtttatgctgttgctttaactgctgctgtgggaagtgcaagcccaaggcacctgagggtgaagagacagaattctacgtatcccctgaagacttggaggcacagctgcagtctgatgagagggaggctacagacacaccgatcgtcatacagccagcatccgccacagagaccacccagctgacagctgactcccaccccagctatcacaccgacgggttcaactaaattcaggagaggctgtgattagagggatgaatcagcatctggccactgcaaccttagaatcatgaactgtagtcactgaagatgggaaggcagccgtcaacctgacccgctgtggctggtcagggccactcccacctcctcttaagtccacccatctgtcaatccttgatacatgaagtgcgtagcatgcagtatttaaagcagtgtagctacggtc

SEQ ID NO: 577 - DNA, 517 bp, Rattus norvegicus
tttttttttttttttttatatatatgtatgtatgtgtgtatttataactggttacacgttggattcataattaggcatcaccagtactagttggcacagtttgtcacttaagctcagggtcaagttcggtcaagatttgctgttccaaagtacaaaagggcagaaaggaaaatcaaggcatttcatctccgtggtgttttcttaaatacagtaatttcagaggaggcatatgtacaggtgaccaaagcctctcgacccctcctgcgtcttggagctgggggctggggtatggagtcagggcacgggggggtcaatgtggccggctgctggactctgacgcctgcctcttgcgggaaggggtatagccgttgagatagccgttcgtctgccgcttggagagcccgccgttcaggatgtcctgtatatgctgcacgatgaggttgatggccacgagattgtctgcacctctaggaatgatcacatcagcatatttctttgttggcaagcagaactcctc

SEQ ID NO: 578 - DNA, 2446 bp, Rattus norvegicus
ccaggagtgagcagctgctcccggttggccctgacggacagacaaaccgacagcctgacatcctagtccaccaactaaccagcctgtacctggctgcttccccctccccaggaacattgaccatgcgtcccctgtggctactcaccttgctgctggctctgagccaggccttgccctttgagcagaagggcttctgggacttcaccttggatgatgggctgctcatgatgaatgatgaggaggcttcaggctcagacaccacttcaggtgtccctgacctggactctctcacacctaccttcagtgccatgtgtccttttggctgccactgccacctgcgggttgttcagtgctctgacttgggtctgaagactgtgcccaaggagatctcacctgataccacactgctagacctgcagaacaatgacatctctgaactccgcaaggatgacttcaaaggcctccagcacctctatgctctggtcctggtaaacaataagatctccaagatccatgagaaggcctttagccctctgcggaagctgcagaaactctacatctccaagaaccacctggtggagattcctcccaacctgcccagctccctggtagagctacgaatccatgacaaccgtatccgcaaagtgcccaagggcgtgttcagtgggctccggaacatgaactgcattgagatgggtgggaatcccctggagaacagtggctttgaacccggagcctttgatggcctgaagctcaactacctgcgcatctcagaggccaagctcactggcatccccaaagatctccctgagaccctgaatgaacttcacttggaccacaacaaaatccaggctatcgagttggaggatctacttcgctactccaagctgtacaggctgggcttaggacacaatcagatccgaatgattgagaatgggagcctgagttttctgcctaccctgagggaacttcacttggacaacaacaagctgtcccgggtgcctgctggcctcccagatctcaaactcctccaggttgtctatctgcactccaacaacatcaccaaggtgggcatcaacgatttctgccccatgggctttggagtcaagagggcctactataatggcatcagcctcttcaacaaccctgtgccctactgggaagtgcagcctgccaccttccgctgcgtcactgaccgcctggccatccaatttggaaattataagaagtagaagcagtggtagccaccatggctcgttggtgagagtctctgaggaacatagccagttgttccacaggggaaggggaacaaagaagcaacacctttgttccccaatattaactcactgcccaccacagcttcctctggctcctaagcatgcacatatgcacatggcctggcctctcccattcccctcagcctttgagatttaacactcacccaccatgtccactcagagactccctataaatcttttttcttgctcatcctgaaactcagatgtttgtgggaagaatggacagagcacatggccacagttactgttccatccgggcatgtattcctcctcttccttacccatgtctgacttctagctctcctgggctctgctgctgcccttatcctctggtgatctctcttcaacaagttcactacctgtccatccaagccgccacctggctctactaactcctggatccttccctctctccaactctgttatgcttcctggcacttttcttccttctggggttatagatctgtccctgccatctctggacctggttcatatctttctgtctttgtctctttctgtatttctttgcctatatctctgtctgtctctatttctgtttctgtctctctgtctttatatctgcctctctctctctctctctctctctctctctctctctctctctctcacacacacacacacacacacacaaacacacaaacacaaacacacacacacacacacacacacacacacacacacacacacacacacacacaccgtcttctccaggctgctttctgtttcacaggtctctggccagtccctgcacaaacaaatatagggaaactattttcctgactgccctacctggcacttgatctcccatccctggaggaagctggaagctggaggcccagaatcctatccatattgtccaggaaagggtccatactctgttatcaagatgaggatcaggaagcttcctagcccctggagaggctcagcaggccaccagaggcccccaccccgaaccagtttgcattggcccctgccctctccccaagatggctaggtcccctccctcacccctgggtccctgctgtggcaggaggtggtggtcagttgtacccagcaggagggagtgctgcttatgaggtcagttgtctctcaattaaagaaacactgtgcaataaaaaaaaaaaaaa

SEQ ID NO: 579 - DNA, 3089 bp, Rattus norvegicus
gatacactgcgcagtggaacggcgagtgcagggcgcagccatgatcacttcagccgctggaattatttctcttctggatgaagaagagccacagctcaaggaatttgcactacacaaattgaatgcagttgtgaatgacttctgggcagaaatttctgagtctgtagacaaaatagaagttttatatgaagatgaaggtttccgcagtcggcagtttgcagccttggtggcatcgaaagtattttatcacctgggggctttcgaggagtctctgaattatgctcttggagcaggtgacctcttcaatgtcaatgataactctgaatatgtggagactattatagcaaaatgcattgatcattataccaaacagtgtgtggaaaatgcagatttgcctgaaggagaaaagaagccaattgaccagagattggaaggcatcgtgaataagatgttccagcgatgtctcgatgatcacaagtataagcaagcgattggcattgctctggagaccaggagactagatgtgtttgagaagactatactggaatctaatgatgtcccaggaatgctagcttacagcctcaagctctgcatgtctttaatgcagaataagcagtttcggaataaagtattgcgagtcctggttaaaatctacatgaacttggaaaaacctgatttcatcaatgtttgtcagtgcttaatcttcttagatgacacccaggccgtgagtgatatcttagaaaagctggtaaaggaagacaacctgctgatggcctatcagatttgctttgatttgtacgaaagtgccagccagcagtttttgtcatctgtgatccagaatcttcgaactgttgggacccctattgcttctgtgcctggatctaccaatacgggtactgtgccaggaccagagaaagacagtgactctatggagaccgaggagaagacagccggtgcagtggcagggaaaacaccagacgctagtccagagcccaaggaccagacattgaaaatgattaaaattttaagtggtgaaatggctatcgagttacacctgcagttcctaatacgcaataataacacagacctcatgattctgaaaaacacaaaggatgcagtacgaaattctgtatgtcatacagcaactgtaatagcaaactcattcatgcactgtgggactaccagtgaccagttccttagagataacttggaatggctggccagagccactaactgggccaaatttactgcaactgccagcttgggtgtaatccataagggccatgagaaggaagcactacagttaatggcaacatacctccctaaggacacttctccaggatcagcctatcaggaaggtggaggtctctatgcattgggtctcattcatgccaatcatggtggtgacataattgactatctccttaatcagctcaagaatgccagcaatgatatcgttagacatggaggcagcttgggccttggtttggctgcaatgggaactgcacgtcaggatgtatatgatttgctgaaaacaaacctgtatcaggatgatgctgtgacaggggaggcagctggcctggccttaggtttggttatgttaggctctaaaaacacccaggcgattgaggatatggttggctatgcacaagaaactcaacacgagaagattctgcgtggtctagcagttggcattgcgttagtgatgtatgggaggatggaggaggccgatgctctcattgaatctctctgtcgtgataaggacccaattcttagaagatctggaatgtatactgtagccatggcttattgtggctctggtaacaataaagctattcgacgcctgctgcatgttgctgtaagtgatgtcaacgatgatgtcagaagagcagcagtagagtctcttggcttcattttgttcaggacgcctgaacagtgtccaagtgtggtctctttgttgtccgagagttataaccctcatgtgcgctacggcgctgcaatggccctgggagtctgctgtgctggtacaggaaacaaggaagcaattaatttactggagccaatgaccaatgaccctgtgaactacgtgcggcaaggggctctgatagcctcagctctcatcatgatccaacagaccgaaatcacgtgtccaaaggtaaaccagttccggcagctgtattccaaagtcatcaatgacaagcatgatgatgtcatggccaaatttggcgctattctggcccaaggcatactggatgcaggtggtcataatgtcacaatctccttacagtccaggactgggcacactcatatgccttctgtggttggcgtccttgtctttacccagttctggttctggtttcccctttcacacttcctatcattggcttatactcctacctgtatcatcggccttaacaaggatttaaagatgccgaaagttcaatataaatcaaattgtaaaccatccacattcgcataccctgcccctctggaagttccaaaagaaaaagaaaaggaaaaggtttccaccgctgtgttgtctattactgccaaagctaaaaaaaaagaaaaagaaaaagaaaaaaaggaggaggagaagatggaagtggacgaagcagaaaagaaggaagagaaagagaagaaaaaagaaccggaaccaaacttccagctgttggataatccagcacgggtcatgcctgcccagctgaaggtcttaagtatgacagagacctgcagataccaacccttcaagccactctccatcgggggcatcataattctgaaagacaccagcgaagacattgaggaacttgtggaacccgtggcagcacatggcccaaagattgaagaggaggagcaggagccagagcccccagagccatttgagtacatcgatgactagggccagggatcccacctgctcagctgtagatgactatcctggcacacactgaaatgtcgtgagggaacccacgctgagacccgctcgatccacacatcattgcctacgctgacataaggaacccgtgtcctgagtctttgattgagaagattctgactgttcagtgttctctttcacaaaaaaaaaa

SEQ ID NO: 580 - DNA, 5328 bp, Rattus norvegicus
agtcaccagctagagcgcagcagaggcacgagagctccaggcgcaagagcgggagctaccgccgcccctatggcgcccgccgccctctgggtcgcgctggtcgtcgaactgcagctgtgggccaccgggcacacagtgcccgccaaggttgtcttgacaccctacaagccagaacctgggaaccagtgccagatctcacaggagtactatgacaagaaggctcagatgtgctgtgctaagtgtccccctggccagtatgcaaaacacttctgcaacaagacttcagacaccgtgtgtgcggactgtgcggcaggcatgtttacccaggtctggaaccatctgcatacatgcctgagctgcagttcttcctgtagtgatgaccaggtggagacccacaactgcactaaaaaacagaaccgagtgtgtgcttgcaacgctgacagttactgtgccttgaaattgcattctgggaactgtcgacagtgcatgaagctgagcaagtgtggccctggcttcggagtggcccgttcaagaacctcaaatggaaacgtgatatgcagtgcctgtgccccagggacgttctctgacaccacatcatccacagatgtgtgcaggccccaccgcatttgtagcatcctggctattcctggaaatgcaagcacagatgcagtctgtgcatccgagtccccaactccaagcgctgttccaaggacaatctacgtatctcagccagagcccacaagatcccagcccatggatcaagagccagggcctagccaaactccacacatccctgtgtccttgggttcaacccccatcattgaaccaagcatcacgggtggcatctctcttccaattggtctgatcgttggactgacaactctgggtctgctgatgttaggactggcgaactgcttcatcctggtgcagaggaaaaagaagccctcctgcctacaacgagaaaccatggtgcctcatctgcctgatgacaaatcccaggatgcaataggccttgaacagcagcacctattgaccacagcacccagttccagcagcagctccctggagagctcagccagcgctggggacaggagagcgccccctgggggtcatccccaagcaagagtcacagcggaggcccaagggtctcaggaagcctgtgccggctccaggagttcagattcttcccatggcagccacgggacccatgtcaacgtcacctgcatcgtgaacgtctgtagcagctctgaccacagctctcagtgttcttcccaagccagcaccacggtgggagacccagatgctaacccttcagggtctccaaaggatgagcaggtccccttttcccaggaggagtgtccctctcagtcccagtgggagaccacagagacactgcagaaccatgacaagccctttccccttggtgtgcctgatgtgggtatgaagcccaaccaaccaggctggtatgaccagattgctgtcaaagtgccttgacccatgacaggggcaacaccctgtaaagggacccccctaggccctgaacccatggaacttcatgactttttctgagcccgtttcctttagtggcctctacagttccagttgcaggtcaactgagggctgaggcagctagagtggtcaaaaacagccttggtgtttcatgggggcagtcccaggaagcccttgttcttctgtgaccctctggatctcctgggtgctctggctgattcttgtttctgaaaggccccagaattttcccttctaaggagttaacatcctcttccatatgctttgagaaaggatagcacagctcttcagcgtgaatgctgacactgcagggcagtgtctgaggtaagtaggaggaagtagtcccctggtagggcacagaggcccttcagattagtgcaagactcttaggaagaaccctctcccaacacactgaaatcctgatgccccaacaggcaggattgctctgttgtagggtgctggggctggggctcagtagtccagtgtgctttttgccctgggtttgatccgcagtactcaaaaagtacacagacagtagacagagacagcacaggctaccccccctgtgtggattttatcctctgcctttgacttttactccagtgggcacacagaagcctggagctccttctcctggccttctcatgaacagttccaaggccataccttccttcagggaatctcagggactgtagagttcccaggcccctgcagccacctgtctcgtcctacctcagcctggagcactctgtctaattccccaaccacttggtactgtactcgctgtgacccaagtgcatgtccgggttatgcactgtgagttggaacagccaatggcgtcagttgaagggcccacgcagaaacagctgaagccagctattttgccaaaggattcatgcttattttctaatcgacctgctcccctagcgtgcctggaggggaagagttcaggagacttctgaagacagaagaagttgagcctcaggtgcttggatgccatgctcacagattccacaggagatgaacttgttagaggagcccagttgttaccatggagacttaaaaagctcagccctctggaatcaagatattggacacttgggacagacttgttaggtctctgtagcatcggactggagaagcgaagggacacgtctgccccctggtggccagtcctgggatggcctcgggccgcctaggcaacaaaaagaatgaattggaaaagactgcttctgggtgcggcctcagctcctgtgcttgtgtggatccctacatggtgtgtgtgtgcgtgctaaggagtatttgtcctgtatgctggacagaattcctgcttataaatgcttttcgttgctgttttgcacactgatccctggctgtgtctggcaactggtttgggatttttctgtggtcctgcgggcccacttctaatgtgtgaaggagagatagttaggtggatccaggaggtccatgtagtgaagagctctggagccacctcaacccccaccccacctttacagccacgcttgcagagaacccagctgtctccctcttgtagcctgtggatgctgaagaaacatccaggcaagtagtctccaggtgtgtccctaacgcgtgctctaagtctggcctcctcattgtgttgtgggaagaagggttctgtcatataggaagcccacaccacgggtctgaacaatgactgcaccagcttggaccaactccgggctctgtgagcagaggagcggggtcagggaagagttcgagtgctgacctctggcacattcctttttttttttttttttttttttttggttcttttttttcggagctggggaccgaacccagggccttgcgcttcctaggtaagcgctctaccactgagctaaatccccagccccgacctctggcacattcctaatggatgggcagtctagaatctccctccttcagtttgtgtgtgtgtgtgtgtgtgtgtgtgtgtgtgtgtgtgtgttgggggctggaggtctgtgttggtgtgtatgcatgtttgcatatatctgcgtgtccctgcgtgtgtgttgtgtatgtgtatgcatgcttgcatgtatgcatgtgcctgtgcgtggagaccagaggttgacttactttgggtgttttgatcactctccatctaatgtactggggcagggctctcatctacacccagagcttgcacatttgctagtcgagcttgcttcagggatcccctgtctgtgcctctggagtgctcaggctgtcatacctgcccggcattgacacggataccagagatctgaattgtgatccttatacttgtgtacctggcattttatccactaagacatctctccaagggctcccccttcccatttaataaattggttttggaccggcaagatggctcagtgggtaaggcagtttgctgaaaagcgtgatgaccggagttggatccctaggaccatcaggtagaagaagagaactgactcctgcaagttgtcctctggctaccaccccatacatatgcttctgcacttgtgtgcatgcacagtctttcacacacacacacacacacacaaacacacacacacacagagtcacacacaataaatgtaataaaatttttaaataaattgaatttattttttaatcattgcttttggttatctgttggtttgtagatggggttttggtatatacccagtctggctacatactccaggcaatgaacttggacattctcctgcctcagtttccagagtgcagagttataggcatgcgtaaccatggcaagacccttggcattacattttgttttcttgatgttattttcccctcttctgggggaaagtctcgtatattccaggctggtattaaccttgtctaaagatgacttgacttttgtatcctcttgcctctacttcccaagcattgggatgacaagtgtattcacactttgatttatgaggtgctggggattgaaccccagggggcctcatgcatgctaggcaaacacaatcaaaatacatgcccaaccccaaacttcacttttaagctgtgatttattaacgttattgagcagacagcttgaacatgattctgtaaaccttgaggaaccctgcactctgctttgccaatgctctatttgctgaagaataattataaagttcaagatctcaaagcagtagttctccccctgtgggtatgcccttttgggtatcccatatcagatatttacattatgatttataccagtagcagaattacagttgtgaagtagcaacaaaatgttttttttaaggcagggtttctctgtgtagatcactctacaaattaggctgcccttgaactcaaagatccacctgcctttgcctcttgagtgctaggattaaatgtgtgtgccatcatgcccagtgcaatgaaataattgtattgttgggtcccctaaacatgagaaactgtattaaagggtggtaacattagggagaactactgccccaaaaaataatggagattggtaatagcattttaaaaaaagattaattttttttactctgtgtgaacacgtgtgcgtgtgtgtgtgtgtgtgtgtgtgtgtctcaaaaaggtcaaaatagggtgttgaatcctctagaactggtgttacaggcaattgtgccaaatgggtgttgggaaccaaagttgggttttttggaaaagtatcaagtgctgttactaactgttgagccatctctcaagccataatgtactctttttttattaaaaaatttagcatccaaaaaaaaaaaaaaaaaaaaaaaaaaaaaa

SEQ ID NO: 581 - DNA, 390 bp, Rattus norvegicus
tttttttttttttttttacatttgtataaaaaatactttatttctccatgttttcagtacaaatgtccaaagagaattccatcaaagaggttttcaaacttgttactacgttggctgcagggcaaatgaggcagtggggatataactggagagactggtgagaggtcgcagaatgttaacaaactccaacaaactcctttctcctggaaccagtgttctcaccctgtacattcgtgttattttcggaggttcctgtttttatttggcatgtaacacattaaaaacctatgacaccacagaactcagctccgttcactgtttccaaagctatcccagacacaggtaaccttttctttcttgtatggtgggggagagaggtaaagggggaga

SEQ ID NO: 582 - DNA, 1993 bp, Rattus norvegicus
ctggagcccagcggcgggtgtgagagtcggtgttgtgagcggcttccaggatcctgcgatccggagaagccggggtctgagcggctcctccagagttactgatctatgaaatggcagagaatggaacaaattgtgaccagagacgtggagcaatgagtaaggaacagcataatgggagtttcacagacccctcttcagtaaatgagaagaagagaagggatcgggaagaaagacagaatatcgtcctgtggagacagccactcattaccttgcagtatttctctctggaaactcttgtagttttgaaggaatggacctcaaaattgtggcatcgtcaaagcatggtggtgtcctttttcctgctgcttgctgcgcttgtagctacgtattatgtggaaggagcgcaccagcagtatgtgcagcggatagagaagcagtttcttttatatgcctactggataggcctggggattctgtcctctgttggtcttggaacaggattgcacacctttctgctttatctgggcccacatatagcttcagttacattagctgcttatgaatgcaattcggttaatttccctgagccaccctatcctgaccagattatctgcccagacgaagaaggcactgaaggagccatatctttgtggagtatcatctcaaaagttagaattgaagcctgcatgtggggcattgggacagcaattggggagctgcctccatatttcatggccagggcagctcgcctctcaggtgctgaaccagatgatgaagagtatcaggaatttgaagaaatgctggaacacgcagagactgcacaagactttgcatcacgagctaaactggcagttcaaaaactagtacagaaagttggattttttggaattttggcctgtgcttctattccaaatcccctgttcgacctggctggaataacatgtggacacttccttgtacctttttggaccttctttggtgcaaccctgattggaaaagcaatcattaaaatgcatatccagaaaatctttgttatagtaactttcagcaaacacatcgtggagcagatggtggctttcattggggctgtacccggcataggtccgtctctgcagaagccttttcaggaatacctggaggcccagcggcagaagctccaccatagaagcgaagcaggcacagcgcagggagaaaactggttatcctggacgtttgagaagctggtcgttgccatggtgtgttactttatcctgtctatcattaactccatggcacaaagctatgccaaacgaatccagcagcgcttgaactcagaggagaagactaaataagcagagagtttttatctgcagaagttagcgtggtggagcctgccttacatcgggagggctctcaccaggaaggaagatccccatttccaacctgtactgatttttaaaacatttctccctgaaagcagtttagtccacattttacactgacatacttttgctttctttgttaaggtaaggtctccaccctcgattcaatccacattgtattccttagggtggatatgatgttctgctgcaaacttaacaaaactggccttctgacactttcacagggccacatggtccaactggagaacctcggccacacagaaccttctgacgtatgttaaatatgccaggcttttcaggcttgtcacaaatgattggtttttctaagtcaccaaatgtatataagttatatatgttggatagcagtcttgcatgcctatcatggaacaatgtaatatgccttcctttcccaccctcaaaaaggccattttatgatgcattgcacaccctctggggaaattgatctttaaattttgagacagtataaggaaaatctggttggtgtctcacaaatgagtacgccattttttattctgtatatttagaatgaagtcgtgaaaaactttataaagacatctttgatcattccaaaaaaaaaaaaaaaaaaaaaa

SEQ ID NO: 583 - DNA, 528 bp, Rattus norvegicus
tttttttttttttttttgcatttcattttttattaccaatcaaaaataaattccatatattgtttagcaaatattatcattgttttgtgacaaaagacacaagagtcataacaacaaaactccccgagagtcaaactcataacaatgccaaaataaatcacaaaaatatacaaattaaaatcttaatgcaaaataaataggagtcatctgctatggcggctgtgacttgcctacccacttggacgccgtctgtggagtcctcccctgctgggaagacacgcagaccaggccagttccagggtatgagaaggcaccggtctcaaacttcatgttctccttgcctgcttccacctccaccttcccctgcaggatgagaatgaagcagtcggctggcttgttccgggtgtacaggtagtggcgggtgcagtgcttgttgtgctcgtcgaacctgagctcctgaatgacgtcagggtacttgagcagccggagcaggatcttctctgacatcagggagggactgaactgcgg

SEQ ID NO: 584 - DNA, 591 bp, Rattus norvegicus
tttttttttttttttttaagaaaaaaagaagtatggcttattatgcattcttcatcgagggcattgaagttgcatggactgataaaagttgatgcaaaatgagaaagaaacaaaaaaacaaaaacaaaaaaaaaaaaacaaaaaacaaaaaaaccagcaaaatgtttaccaaaaaactcaaacaaatgagcagtgcctgttcaatttcacagtctctgttgagttcagttgtaaatatgtttcaaatgacattttcttgggaaaaaaaaaatctctacaacattgtggaatgtgaggggcaactgtctcccgggcataggcgtctcaaagctgcagtagattgcgccttgatcaggtggttaatttgtgcttttatcacggagaactttgagcatcctgggaagaggtgcccccacctcaatgatatttctctgagaacaacttttgtaggactgtgtttctttagatacatttagtacaactgtaggtgacgagtagtcagtgattgcttgctagctacacaccagggttgatccattttaaaacttttggcattttgtcctcgtgggccataaatacagaaccttgtgt

SEQ ID NO: 585 - DNA, 570 bp, Rattus norvegicus
tttttttttttttttttatttttatattttatataattaataaaacagtgcttgtataaaaattcacacaaagttgctagagagcatacaagttccaaaaaatgtcctgggtttgtggtacattcagttttctaagggtgcactcagatcagtgtaacaggcagacatgacgtggtatctcgttctctttggtaaaactattcttgttatatcactcctcacagtagtcactctgatatccactttgtgcaaggtctgcgcttcctgggatgtcagacatactattttagtgaacatcagaatgtcggggctaatctctagtcctctggatacaaggcaaaaataatctaaaacacggagaatttagatggggacaggaaaagcaattgccaacaagattttatgagacccattaaattctgaaaaaataagtattttatattatattgcttcatggaaaaaaaaatgcccactggagcttcctgtacggatggggaactgaggaccatacagtccagcaggggcacgaaacagctcccagagtgtccagctcgtttcactgaaagggac

SEQ ID NO: 586 - DNA, 550 bp, Rattus norvegicus
tttttttttttttttttcaatgttcagtttcctttaatgacccccatctcccttgaaggataggtgcaggcagctaggtgactggcaagacatgttcacttgaagatcttgccttgattgacggctttgccaacgtgctggaaggccccctcccaggaaaagtactctcgaacgagggtctgggtctcctcgctaccaggatccagtttccgccatgtatatgactcatagtccacctgccaatctggactcagcggaaaggcaagatcttggcctcggaagacccaaaccccagaaatggagctgctgttgttggttccaaacaggataacactagcaaaggcattctttctcagtttgtccaatcgctgaaacatcccagtgatgaggttacagctcatgaaggtctgggtgagctcttcagggaagcggtactcagcataccacagggaccagccatccttatcaaaatgctcccaaaaatatggcagcgccacagagagggtgtcctcattggagtactttcgcttaaactcatccaacacaaagg

SEQ ID NO: 587 - DNA, 1956 bp, Rattus norvegicus
atgaagtgggtaacctttctcctcctcctcttcatctccggttctgccttttctaggggtgtgtttcgccgagaagcacacaagagtgagatcgcccatcggtttaaggacttaggagaacagcatttcaaaggcctagtcctgattgccttttcccagtatctccagaaatgcccatatgaagagcatatcaaattggtgcaggaagtaacagactttgcaaaaacatgtgtcgctgatgagaatgccgaaaactgtgacaagtccattcacactctcttcggagacaagttatgcgccattccaaagcttcgtgacaactacggtgaactggctgactgctgtgcaaaacaagagcccgaaagaaacgagtgtttcctgcagcacaaggatgacaaccccaacctgccacccttccagaggccggaggctgaggccatgtgcacctccttccaggagaaccctaccagctttctgggacactatttgcatgaagttgccaggagacatccttatttctatgccccagaactcctttactatgctgagaaatacaatgaggttctgacccagtgctgcacagagtctgacaaagcagcctgcctgacaccgaagcttgatgccgtgaaagagaaagcactggtcgcagctgtccgtcagaggatgaagtgctccagtatgcagagatttggagagagagccttcaaagcctgggcagtagctcgtatgagccagagattccccaatgctgagttcgcagaaatcaccaaattggcaacagacgttaccaaaatcaacaaggagtgctgtcacggcgacctgttggaatgcgcggatgacagggcagaacttgccaagtacatgtgtgagaaccaggccactatctccagcaaactgcaggcttgctgtgataagccagtgctgcagaaatcccagtgtctcgctgagacagaacatgacaacattcctgccgatctgccctcaatagctgctgactttgttgaggataaggaagtgtgtaagaactatgctgaggccaaggatgtcttcctgggcacgtttttgtatgaatattcaagaaggcaccccgattactccgtgtccctgctgctgagacttgctaagaaatatgaagccacactggagaagtgctgtgctgaaggcgatcctcctgcctgctacggcacagtgcttgcagaatttcagcctcttgtagaagaacctaagaacttggtcaaaactaactgtgagctttacgagaagcttggagagtatggattccaaaacgccgttctggttcgatacacccagaaagcacctcaggtgtcgaccccaactctcgtggaggcagcaagaaacctgggaagagtgggcaccaagtgttgtacccttcctgaagctcagagactgccctgtgtggaagactatctgtctgccatcctgaaccgtctgtgtgtgctgcatgagaagaccccagtgagcgagaaggtcaccaagtgctgtagtgggtccttggtggaaagacggccatgtttctctgctctgacagttgacgagacatatgtccccaaagagtttaaagctgagaccttcaccttccactctgatatctgcacactcccagacaaggagaagcagataaagaagcaaacggctctcgctgagctggtgaaacacaagcccaaggccacagaagatcagctgaagacggtgatgggtgacttcgcacaattcgtggacaagtgttgcaaggctgccgacaaggataactgcttcgccactgaggggccaaaccttgttgctagaagcaaagaagccttagcctaaacacatcacaaccatctcaggctaccctgagaaaaaaagacatgaagactcaggactcatctcttctgttggtgtaaaaccaacaccctaaggaacacaaatttctttgaacatttgacttcttttctc

SEQ ID NO: 588 - DNA, 163 bp, Rattus norvegicus
tttgtttttttttttttccattttcttttaaaaacttccatcacacatgggtgtcttttaatgggaaatcaacatcgcatttaaaatacctggacaagctggcgtgagacaactgggaactcttcagtacccatcgatgacatggagggatggagggagggat

SEQ ID NO: 589 - DNA, 505 bp, Rattus norvegicus
  misc_feature (1)..(505): n = a or c or g or t
cggccgccgggaacctggaggccggggcggtggagccagcacgcgggtagaagaggacagtgattcagagacctatggagaagagaatgacgagcaaggacatttttctagaagaaagatcgtctccaactgggatcgatatcaagatactgaaaaggaggtcaatggtgaaagtggagaatctcagcggggcacggacttcagtgtcctcttgagctctgcaggggactccttttcacagttccgatttgctgaggagaaagaatgggatggtgaaacttcatgttcaaaacagaattcagcgctctacgtggacagtgagtcactggttcgagcccttcagcagctgcctcttgcagtccgtcttaatgttgcttcagagttgatccagaccgcagttcctttagaacttccacaggcganaccaaggagaaacgatgatggcaaggagctgggcatgcagttaagggggcccctctcccagctcaggtctgctgctggtggg

SEQ ID NO: 590 - DNA, 327 bp, Rattus norvegicus
tttttttttttttttttgaagtgcggaatgtttacccggcaaagaacgagggatcatgggcattagagggaagtacagaggtgatccagaccgtgctggtgcttttgtcatttcttccacgaggaccttactacttgggaagagtagacgaccaagactcaggagaggtcgtagcatttgcaaaggcttacacagcacggctggactgaagcccagttccaattgacacccaggcccagaggggcaacaactttggtctacatcacacagctagacagaagaaaagacgaaatgatgtttctctttgggggttggtggggaaactga

SEQ ID NO: 591 - DNA, 2547 bp, Rattus norvegicus
atggaccagaggaaccaggaactacagtgggtggaggcggcacactggatagggctggaggaaaaccttcgagaggatggtgtgtggggtcgtccacatctctcttacctcaccttctggagccttctagaactgcagaaggtcttctcaaaaggcaccttccttctggatctggcagagacatccctggctggggtggccaataaacttctagacagtttcatctatgaggatcaaattcggcctcaagaccgagatgagctgctccgggctctgctactcaaacgcagccacgctgaggacctaaaggatctggagggagtgaagcctgccgtcctgacccgctctggggccccttctgaacctcttcttcctcaccagccatcgctggagaccaagctgtactgtgcacaggcagaggggggctcagaagaaccctcgccatctgggattctgaagatcccccccaattcagaaaccacattggtgctagtgggccgggctagtttcctggtgaagcctgtgctgggcttcgtgagactgaaggaagctgtgccgctggaggacctggtgttgccggagcctgtgagcttccttctagttcttctcggacctgaggctccgcacatcgactacacccagctgggcagggctgcagcaactctcatgacagaaagagtgttccgcgttaccgcctccctggcgcagagccgaggggagctgctgagctccctggatagctttctggactgtagcctggtgctgccgcccacagaggccccttcagagaaagctctgctcaacctggtgcccgtgcagaaggagttgcttaggaagcggtacttgcccagacctgccaagccagaccccaacttgtacgaggcattagacgggggaaaggagggccccggtgacgaagacgaccctctaaggcgcaccggccggatctttggaggcctgatccgtgatatccggcgccggtatccttactacctgagtgacatcaccgatgcgctcagtccccaggtgctggctgctgtcatcttcatctactttgctgccttgtcacctgcggtcaccttcggcggtctcctgggagaaaagacccggaacctgatgggggtgtcagagctgctcatctccacagcagtgcaaggaattctctttgctctcctgggggcacagcccctgcttgtgctcggcttctcaggacccctgctggtgtttgaagaagccttctactcgttctgtgaaagcaataacctggagtacatcgtgggccgcgcgtggatcggcttctggcttatcctgctggtggtgttggtggtggcctttgaaggcagcttcctggtccaatacatctcccgctacactcaggagatcttctccttcctcatctccctcatcttcatctatgagactttctctaagctgatcaagattttccaggactacccgctacaagagagctatgcccctgttgtgatgaagcccaaacctcagggccccgtgcccaacacagccctcctctcccttgtgcttatggttggtaccttcctacttgccatgatgctacgaaagttcaagaacagcacctacttccccggcaagctacgcagagtcattggggactttggggtccccatctccatcctgataatggtcctggtggataccttcatcaagaacacctacacgcagaaactctcggtgcctgatggccttaaagtgtccaactcctccgcccggggctgggtcatccatcccctgggtctgtataaccatttccccaagtggatgatgtttgcttctgttctacccgctctgcttgtcttcatccttatattccttgagtctcagatcaccacgctgattgtcagtaaacctgagcggaagatgatcaagggctccggcttccacctggacttgctgctggttgttggcatgggcggggtggccgccctctttgggatgccttggctcagcgccaccactgtgcgttctgttacccatgccaacgccctcacagtcatggggaaggccagtggtccaggggctgcagcccagatccaagaggtcaaggaacagcggatcagtgggctcctggtctctgtgctcgtgggactgtccattctcatggaacccatcctgtcccgcatccccctggctgtactgtttggcatcttcctgtacatggggatcacatccctcagtggcatccagctctttgaccgcatcttgctcctgttcaagccacccaagtaccacccagatgtgccctttgtcaagagggtgaagacctggcgtatgcacctcttcacgggcatccagatcatctgcctggctgtgctgtgggtggtgaagtccacgccagcctcgctggccctgccctttgtcctcatcctcaccgtgcccctgcgtcgtctcctcctgccgctcatcttcagagagctagaactccagtgtctggatggtgatgatgccaaagtgacctttgacgaggcggaagggctggatgagtatgacgaagtgcccatgcctgtgtga

SEQ ID NO: 592 - DNA, 519 bp, Rattus norvegicus
ttattttttttttttttggaagtagaaatatttattcagaatataagaacgtttgtaaaatattataaatgtctctgtataaataaatggcgtttttttttttaaacaattctatatcaaataacacaaattagctattttacagcagctaaaaactaaaggcatctggaaacatttaaagctacaagtgaatctaaaactgacaaggtatagtacagtgtgtagtagccactttaaaatgacactttccatacaagcagaacagtactgacagatgcagcagacagatgtgctttaagaacagtgcattcaagcaggattttctaattcaagtggtataaaaaacattttcaattaataaaaaagttaaatttcatgcaaagtaagttaatatgtctaaaagcaaattagaaatagaagtgaacatttgtagttgttgcatcaggaaggtaagtgccccaacaggagcactgcagaagaacgctgcggactctacagaatcccttccacatctcaacc

SEQ ID NO: 593 - DNA, 265 bp, Rattus norvegicus
ttttttttattttttttagatgacatactttatttccagtctacaaccattaaaaacactttgtaagtttacactgttcagttctcatatctgaaataagacacagggcaaagacagctggtggactagatgccgtcctaccacccaatatgtcctgagaaggagcctttaaagatagaaaggcggacgggggtagtggaatgcagaggagtacgataccccagccgtatggagatgtgtctaaattttgcacagggacccttag

SEQ ID NO: 594 - DNA, 293 bp, Rattus norvegicus
tttttttttttttttttagtaacttacattttatttcatgtacaaaggggccttgtggcagtgaggtgacatacggcaaacagcactccggtgagcacctggaaaaggctgttgaagcacatgcagctgccagtgagcaggccctgggggccaggataggcacgcaggaaggcacaggcttggaagagcttctctctgcttccctccaagttgggaccaaacccccggcacccacaaagtcacatgtgctccggacatttgaaaatagcacagccccccctgaaaacccaaca

SEQ ID NO: 595 - DNA, 541 bp, Rattus norvegicus
tttttttttttttttttggtaacttcaaatatatttttattactttctttttcatcttagaaagaacatgaaacccgcatgcagcactcatgaatctcagcacttacatagcagattcacagccgtccagtgcggcctctactgaggggcagcgtgtggcaggggcgggtactgaagcaatatgtacacaggagagggtgcagggtcatcctaactccaaaagaggacctcgctgtttgcatatgcaccgaagggggagtgcgctttctgtgggggcgaggggaacagagctacgtgggtctccccatgccagtaggatgtgtagctctggctggatgtcatgcattgagtcctgaattttccccttttcctccacacagttttctcacgctgccgggggcttctgatgcttcagaagcatcatctaccaaagcagtgagcctttcagaaaccctcagaggttgcgagagaaagacccagctcctttaaggatcgcttgcctggttgggataggggaatgagctggggtgggggtggggct

SEQ ID NO: 596 - DNA, 446 bp, Rattus norvegicus
ttttttttttattttttgttttgtttttttgttttgttttgttttactgggctttagataacccaggatggtagttaattatgccttccttgggcagggattatggcagggatatgcaaggcactctaatacttagccttctaagcagactgggaaagggaaagccaaacggggatggggggcagtgggagtgggggtgggggtgaggagaaagctctaagatgaggttggaatcctcccagagcttggtacaatgcaccacttaaaccaaatccaaacaatctgaggcttggcgacactgtttttaatgtgttcataccaccttaaatgagaagaacctacagggtcaatagttaaatctcaaagaattgtttaaacatcacagcaagatgtattccccaagtcatttttcccattcctttctatggacacatggtcttgctaca

SEQ ID NO: 597 - DNA, 517 bp, Rattus norvegicus
  misc_feature (1)..(517): n = a or c or g or t
tttttttttttttttttgaccagaacagtttattgacaagatagcatataaagacactacagagcatcaagcagggagccttttctagagatggttaatcaggggcaccccatgggaaggcagctcctggtgcagctgccggaagaccatggcacagtggttcctctcctgggtcttgccgagggcgtggtacagcctggcctggaagtacgacacatccctgatgcgctctctacagtcgacttttgcaaagtagttcttggcttcagtgaggttctgaatggctgcttccagagcttctgctttcttcactgggtcataggaagctgctgaagccacttggcacttggacactaagaacatggcacggcctttgtccaggatggccccatcggccaggatgggctcaatagccatgtggagaagggttaaggcctgttctgggatccccaggatganctgggcataagccaagttgagcacagtttcagaggccaagtactgtaaccggtattct

SEQ ID NO: 598 - DNA, 1293 bp, Rattus norvegicus
ggagcattctgggtagaggtgaaaggccagagtcagaaggaagagttccaaagcaagcttcccaaggaaaatgggcacccagggaaaggtcattacatgcaaggcagccattgcctggaaaactgacagccccctttgcattgaagaaattgaagtttctcctcctaaggctcatgaagttcgaattaaggtaatcgccacatgcgtgtgccctactgacatcaatgccaccaatcctaagaagaaagctctcttcccagtagtcctcggccatgagtgtgcaggaattgtagaaagcgttgggccaggagtgaccaacttcaaaccaggtgacaaagtaatcccattcttcgcaccacagtgcaaaaagtgcaagctctgtctgagtcctctcacgaacctctgtgggaagctcagaaattttaaataccctactattgatcaagagctcatggaagacagaaccagcaggtttaccagcaaagaaagatcaatttaccacttcatgggagtcagttccttctctcagtacactgtggtttcagaagccaatcttgcccgagtggatgatgaggcaaatttggagagagtgtgtctgattggatgtgggttcacatcaggctatggggctgcgatcaacactgccaaggtcacccctggttccgcttgtgctgtctttggcctggggtgtgtaggtctttctgctgtaattggatgtaaaatagcaggtgcttccagaatcatagctattgacatcaacagtgagaagttcccaaaagccaaggccctgggagccactgactgccttaatcccagagacctagacaaacctgtccaagatgtcatcactgaactgacgggtggaggtgtggatttctccctggactgtgcaggaacagctcagaccttgaaagcagctgtagactgcaccgtcgtaggctgggggtcgtgcactgtggtcggagcaaaggttgatgaaatgaatatatccaccgtggacatgatattgggccgttctgtaaagggaacgttctttggtggttggaaaagtgtagactctgtcccaaacctggttactgactacaagaataagaaattcgatctggacttactggtgacccatgccctaccttttgacaaaatcaacgacgcgattgacctgatgaaccaaggaaaaagcatccgaacaatcctgaccttttgaagacgccaggaggaacttggaatgtcatcagattggatccaagcttgtccagatgacttcccacttcccacgatgagccaaggaaagcg

SEQ ID NO: 599 - DNA, 555 bp, Rattus norvegicus
ttttttttttttttaaagtgtttctgatggtttattggtgacttatcgacaggccaaccgccttcctccaaccaatcgaggtctggaaggaagacgtttccccatcagaaacgacaacacagatggaattaatcatacagactagggcagatttacttctttcacacaattttagtaacaaaaaggatatttgttacaagcagagggacggaaccacaagtacacaatgtcaaaggcccatcttaaagttctgttgtatttaaatgacttttatttgtttaaaaaaaacaaaacaaacaagttgctactcccacctataacatgggacatactgaagttttaagatgacactttggagaagcttatgacttctctcagttctgctgtaagctcagattaacttcaattaaagaagctaagtaattatccaacattattaaaagcttgattcaaaattttgtaggaaagaaactgagaatggagatgcgggagacagcctggtaatgtcacatacacctaggccttgcaatcctcatgaactaagacagctagaat

SEQ ID NO: 600 - DNA, 1998 bp, Rattus norvegicus
ggctgggctttaggtggcagctcaaggtttcttcccaaccgcaggctgcgagcttgggggaaagcatagggatgggagctcttacctgacagtgaactaggcagcagagccatgcctctgtagaccaccggaacggagggcaaagattcgtcacccacagcagcctaattatagctttgatcaaccccccccatcactgaccttccctgcaccctttgccctccgcgggagtaaagaaccaccactcaccccccaccggaacccgtctcagttcgtgttggaagatggatggcccagagagagatttcaaccttaaggttgtcctgatcagcttcaagaagtgtctcactgacaagggagaggtgctgctggaccactatactgccagctggaaggggcttgtcaggtttctgaacagcctaggggctgtcttttcattcatctccaaggatgtggtctcaaagcttcagattatggagcatctgagaagtggcccacagtctgaacactacattagcttgcaatccatggtagcctacgaggtgagcaacaagctggtggacagagacagccgctcacgtccccgacaccctaactcaggctgccggactgtgctgcgcctacaccgtgctctgcattggctacagctgttcctggaaggcctgcgcaccagctctgaggatgctcgtacctccaccctctgcagtgaggcctacaatgccacactggctgcctatcactcctggatagtacgtcaagctgtcaatgtggccttccatgccttgcccccacgcaaggtcttccttgaggccatgaatatggggtcctctgagcaagcagtggagatgctgggagaggccctgcccttcattgagcaagtgtatgacatctcccagaagctctatgctgaacattccctgctagacctgccctagtagtggtaaccatactgtgtggacttcccctgctcagaactgggtttgggcaatctagggctactcccacagcagggctttctggaaactactgtcacccctgtaagctgaactggtggaaagccagtctgtgaaaagaaaggtcgtgggcagctgaaccaagaaaggtgaatgctagtcatcctcttggttcaggatgagacagttgaactccagttttgccctccacttcagtcatgtgttcagtcaggcttgattgaagtgcagatggaaaatggagaagtggggggcggtgtcatgtatctgcaacaacccaaggttgctctacctctcctgtatagaatctgaaatggtataaggacccaggacccaggagctgtcttccctacagccaacatgcccagccaatgtgtatcctacatgtctggggccccttcatattccaaaagctgtaacatgggtaacatgaagttcctctggcagtggcatgagtccctgcccttcacctgcttccttgttagtctctctgcataccaaacaggcccttgcctccttggaaatggaaactgtatgaaaccaatagctgaggcttctctaagaaagcctgccctggtcagtgcagcctgttccacagcttctccagtatagtaccgtcagccttctgaaggtggcttcttacaacacatgtacccccaggattctaagatgtcaatactaactggccaaaccatacctctctctagccagccctgctgctcctgttgccataatacgcagatgacttaggacatgacttgtgggaggagactaggcccctttgtctgacagatggccatacctagcatggctaatacccagtgtataagaccataagctttcccactgggtcttaatgttaaacccgaggacaatgccctcagcgtagctgatgtgtgcaaatgcaaactttggggggcacatctctttccttaagaattgtgatctatgtatttccaacataaataaattacacctacatgattgggtatagcactctggaaaaaaaaaaaaaaaaaaaaaaaaa

SEQ ID NO: 601 - DNA, 516 bp, Rattus norvegicus
tttttttttttttttttataaagcaattccaaagtttattgccatagaaaaaactgatttctcaaagtcaattcttattctctgtaaaataatacacatgaacagaaatcactatacttttggtccaagatatgttgggtttttccttcttcttcagatgatggatagatgcagccaaaatctatgaacgcgtgtacttgccccaaatgtgcagcataaacacagaagcgatgaacagaagactcatcaccagtactgggacagggccaactttgagccctggggaatcttctgtgtagaatcgccacatccccccagtccctgcagaggtggtgcggcctgcactccgggttccgcagctggcattttttctctgccggacagtggatcccgccgcccgtgcggccactgctttgctaggagaacgcccagaggagcccacgttggtggcactaggcgttggacccggcatgctgatgtctaagaacagtaggcacaagagatatgaagatgaaa

SEQ ID NO: 602 - DNA, 519 bp, Rattus norvegicus
tttttttttttttttttaaatacctcacccatcatttcaaagcttaaaaaaacaaccaactccctcccccccaaaaaaacccttgcttaaaaaaaagaaaaaaaaatctaaaattgcttcaaaaactgatggggcaagcccaggcctgacccttcaacctggaggcctggtctcccgcacgctttgctgccagagcctagcccagtgccaatacggcaaccgtcctgcggctggctcaccctacccaaccctgcccaagtctggacggatgggcacttgatttgattctgtcagtatcacccgaaaaagaaaaaggtgactgccagggtgctaaacactgcccacagagcccgaccctcttgggaatgtgtaagttatctggaaggagaaggtgggaagtggaaataaatacccagatctaggttactgttcctgggccttgcttgggggctggctcagcccagcactgaggcagagagggctccagcgttaagaccctgattgtccaaacactgcatt

SEQ ID NO: 603 - DNA, 774 bp, Rattus norvegicus
gccaccatggcaactacaccgtacaactactcttacatctttaagtatattattatcggggatatgggagtaggaaaatcttgcttgcttcatcaatttacagaaaaaaagtttatggctgattgtcctcacacaattggtgttgaatttggtacaagaataattgaagttagtggccaaaaaatcaaactgcagatttgggatacagcaggacaggagaggttcagagctgttacacggagctactatagaggagctgcaggtgcgctcatggtgtatgacatcaccagaagaagtacatataaccacttaagcagctggttgacagatgcaaggaacctcaccaacccaaacactgtaataattctcataggaaataaagcagatttggaagcacagagagatgttacctatgaagaagccaaacagtttgctgaagaaaacggcttattgttccttgaagcaagtgcaaaaacgggagagaatgtagaagatgcttttcttgaggctgccaagaaaatctatcagaacattcaggatggaagcctggatctgaatgctgccgagtctggtgtacaacacaaaccctcagccccgcagggaggacggctaaccagtgaaccccaaccccagagagaaggctgtggctgctagtgacctctttgctctggtccctcattttgacctttcacctcttgtctgttggaagcagtactttttactgccttcttgtcttctgtacatcttactggggtttaattaaaaaaaaaaaaa

SEQ ID NO: 604 - DNA, 459 bp, Rattus norvegicus
tttttttttttttttttgagtcaaccaagatattttattgtgaggcagacatttatttacaggacagacacagaaacatccccactgccaaaccccactacaggggtatgcctgcctttgctttagttcttcccagctaggcagatccacagaggcctgaacaacacagttgggaaggccgttgatctcctgttcctatatgaccttaggagacggcatagcgaaaccacccaaaattgcccaaacgattcaaagtatctgaaagtcacttttgatatttaaaacattgtctactgttctagctgtaggatcagaggggacctacatctcaaactgtgtggtgtgcgttcctttgtagttcaacattcatatcaaacaacgcgcatgagccccgggtgtaacacacgcttgtctgtgttttaactgttgctggttcctcagttaaaggagtctttggta

SEQ ID NO: 605 - DNA, 459 bp, Rattus norvegicus
tttttttttttttttttccaagagaatgtcaaaatgctttgctgcctaaaaggacattgaaggaacaagcatcagccaggtcctgacgtcccaagttgggcagcttttcagtcctcgagtctgactgtgtccggggtttgagggacgtgcagtcatacagagaatcatcatggcgagtgaatggaagcaacatcaggcgtcactgggcgcagtcacacagtggattcctaacattcagtgcagccgcccgccatacttcatttacaaggctttttaccctctcctggctgagtggagaagtatccagtgacccagttcttcacggtgtggaggaagcgtggaacttaacaaacgcaatggccgccagctccttgcagaactcctctaacacaatcacaccctccagcagcgtgatgtggtcaacgatggggccttcgggctccaagccaagcagtcgct

SEQ ID NO: 606 - DNA, 2041 bp, Rattus norvegicus
ctggcacatctcccagaatgagtaccacaggagctaaggctgtgaaaatagagtctgagaagtcacaatcaagtgagccacctgtgattcatgagaaaaagccaaaaggaaagccaaaggaagggtcagagccccaaactcttcctaagcatgcatcagatacaggaagtaagcatgctcacaaagaaaaagcactttccagatcaaatgagcagatagtgtcagagaaatcatcagaatcaaagacaaaatttcaagatgctccttctgctgatggagagagtgtggctggaggtgtgactgtggccactgcctcagacaaggtggttgttaagaaaaaagagaagaaatcattaacacctactttacctatggagtccacactaaacaagctatctgacaagtcaggcgtgaatgctgctttggatgacctgatagacaccttaggtgaatgtgaagatactaacaaagatgatccaccatatactggaccagtagttctggacccaatggattctacctaccttgaggcactgggtataaaagaagggactattcctccagagtataggaaacttctggagaaaaatgaagctatcacaggacctcttccagattctcctaaacctatgggaatcgaccatgctatagatgccttgtcatctgatttcacctgtagctctccaactggaaagcaaactgagaaagagaagtctactggggaaagttcgaaagctcagtctgcaggagtgaccagaagtgctgttcctccccaggagaagaaaaggaaagtagaagaggaggtcatgaatgatcaagccctgcaggctctgtcagattcactgggcacccggcagccagaccctcagagccatcttaggcaagccaaacaagtcaaagaggcaaaagcaaaagaagaaaggcaggagaaatgtggtgaagatgaggacacagtacctgctgagtacaggttaaaaccagccaaggataaagatggaaaaccactattgccagaacctgaagaaacatctaagtgcctgagtgagtcagagctgattggggagctttcagcagattttgtccaacctacatatcaagaaaaaccatctatgccagctgcaaaaataaagaagggcgtagtgccagatgatgctgtagaaaccttggctagaagcctggggacaaggaaagaagatccagaagatgaaaaatctctggtggataaaggcaaggagaaagctaaagaagaagatcatgaaaaacttggtgaaaaagaagaaacaattcctcctgattatcgactagaaatagtcaaggataaggatggaaaaccgctcctgccaaaagaagccgaggaacaacttccacccttaagcgatgacttccttcttgatgcattgtctcaggacttctccagtcctgcaaacatattgtctcttggttttgaagatgccaaactttctgctgctgtttctgaaacagtttcccaggtgcctgctccaagcaaccacacagcagccccaccgcctggcactgagaggagagacaaagaactcgatgatgccttggatgaactttctgacagtcttggacaaagacagcctgatccagatgagaacaaaccactagatgataaagtaaaggaaaaaatcaaagcagagcatagcgagaaactgggagaaagagacgacaccatcccccctgaatataggcatctcctggataatgatgggaaggacaaaccagagaagccactgacaaagaacacagagaagcttggtcaggaccaggaccccattgatgccctctcagaagacttggatagctgccccccaactacagagacttcacagaatacaacaaaggagaagggtaagaagacttcaagttccaaagcatccaagaatgaagagaaaacaaaggattcctccaagaagacagaggaagtgcccaagccaaaggtggatgaagatgcaacataaagtttatgcattttggtatctgaataaaaattcttcagctggtggatggtgacttttga

SEQ ID NO: 607 - DNA, 511 bp, Rattus norvegicus
tttttttttttttttttcgttagaaagcactatttatttcttcttactcttgtttcgtttctcttctttcagcttctttttggagactctgggtgtgctggcctttttgtataggtgatacccaatcaggcccaggagtgctggcaccatggccatgcctaccagaggcaaaatgcccttcagcagcttttgccagtagttggctcgaatcaaggcgatcagctccacatcatactgcaccactgcatcggctgggatagatggtgggtaccctctctttccataagccaagtgagaaggaatgactgctcttcgcttctcccctacacacatgtccagaaggctctgctccagacctgggatcacctgcttttggccaagttctatgaccagaggatctctggtcagagaagtgtcaataatgcgtccatctgccaagctgcccgtgtagtgtatgtggagcgtgtctccaaaggcagcggattccgtgcacgattcagggggctgcacc

SEQ ID NO: 608 - DNA, 1967 bp, Rattus norvegicus
gtagcgaccctttctttctttctttttttttttttgttttttgtttttaagaacaattctaaatttgccctcccctgttttagaagcgcatgagaccatatgtgtctgctcgtgcatttgctaaatatttccgatccttaagttcttgtgtttgagtgaagaatctgacccctgttctgcttctcaaggtgtcaaaatgtccacagaaggagggtttggcagtaccagcagcagtgatgcccagcaaagcctccagtccttctggcccagagtcatggaagaaatccgaaacttaacagtgaaagatttccgagtacaagaactaccactggctcgtattaagaagattatgaaactggatgaagatgtgaagatgatcagtgcagaagcccctgtgctgtttgctaaggcagcccagatcttcatcacagagctgactcttcgagcctggatccacacagaggataacaagcgtcgtactcttcagaggaatgatattgctatggcaattacaaaatttgatcagtttgactttctcatcgacattgttccaagagatgaactgaaacctccaaagcgccaggaggaggtacgccagtctgtgactcccgcggagcctgtccagtactacttcacgctggctcagcagcccactgctgtccaggtccagggacagcagcaaggccagcagaccaccagttctacgaccaccatccagcctggccagatcatcattgcgcagcctcaacagggtcagaccacacccgtgaccatgcaggttggagaaggtcagcaggtgcagattgtgcaggcccaacctcagggtcaggcccagcaggcccagagtggtactggacagaccatgcaggtgatgcagcagatcattaccaacacaggagagatccaacagatcccggtgcagctgaatgccggccagttgcagtatatccgcttagcccagcctgtatcaggcacccaagttgtgcagggacagatccagacccttgctaccaatgcccaacagatcacacagacagaggtccaacaaggacagcagcagttcagccagttcacagacggacagcagctgtaccagatccagcaagtcaccatgcctgcaggccaagaccttgcccagcccatgtttattcagtcagccaaccagccctctgatgggcagaccccccaggtgactggagactgaggcctgagctgcaaagccaaggacccccaacacaatatttgccatagagcccccaggcgatggggacacaccttccctcaccagaggacccgggacttcattgcctcctgcaggctaagatactggtgcactactctccacgcctggggactgagagcctacaacagaaagatgcaatattttttattttttattttctttttttcatttttgtctccaaggaatcaatatttcaatatatcgagctatgtgtccaatgctatgaaacgagaatattaaataacatatttatggcattttcttgaaacgtgtggttgaagaaataattctcttgtgtgtttcctggcttgggcactcaccaccactgctaaagggcagggcagcctgtgctcttccttcccaagggtgtacaggatttccactctgccagttctgccctcagaaaaagagaaagggtcagacccttttccaccagcattcttctctgcccctttcctagagccttccgcatccagaagatgtgggaacatttcttgcctgtgggccatgaactcattctccacagagagctggtttcctccccatcccttctctccaagatccaggagaaccaggactttgtgcactgttctgcccactgttttattttttaaatacattaaagattgtgctcatctccattgctgcatggacttcaaactgcatgaaatgcaataaatcttgttttcggtaaaaaaaaaaaaaaaaaaaaaaaaaaaaaagg

SEQ ID NO: 609 - DNA, 569 bp, Rattus norvegicus
tttttttttttttttttatatataaaatcacatttatttgagactgggactttcgaagcccagtctggcctgatctagtgtccagaagcactgattagcagatgtgttttcctctagctggctacaatggctgcggttcattctattcagatgtcagacaataggcacagctgggttccttattcaaaatctgaaggagtctgggaggaggacaaacacatagatagaatcaagcttaggccaggaaccagaaactacggattgctttgttaaaggccaaggaggcttcaaaagcgaacacagctggagtctcatttcagtctccattttcgcaccacttcagtggaagttccatgaaacagcccgatggttctgaagtgccatcaagtcacttcgagctccagcaacttaggtttccaggacatcttctagaagaactcgatcatcccttccacgttatggggccactcacctggcctcgatgcccacctggactcgaagtagccctgcaccgcgcctgtaccctgatgacgacggatgcagaaaaggtgagggccgccctcgtgccg

SEQ ID NO: 610 - DNA, 536 bp, Rattus norvegicus
tttttttttttttttttaaatgagtatgtgtggctttattatttacaaaaacaagcagcaggctgttatctgctaagccctgcttttagaggtaacaaacagaagggattgatcccctctagttgacaagtatggggctcaggctttcacagtgggtggtagacagtgtcaatgaagagaggattcggtgactacaaaccgaggccccagtgttgcattcttgtccagcttggagggaaggtatgtcaataaagtggttcttttgtttatgctcatgagaagaacattagtatgttctcagccagtggtggctaggctacctgaccataaaacattagcttctgtggcaggtctgaggtgggaaaactgggttgtgattttcaatgtctaaaatctgaacaatctgacctccatcatctttagctagaattgcccttctatcaatatgaaagaattggaactcattggataaattcttcagataaaggatactcaaataataatctttatccttcccaaaaaaatttatctgtgta

SEQ ID NO: 611 - DNA, 475 bp, Rattus norvegicus
tttttttttttttttttatgagtatggaattaattaaaacttcgaatctttattttgtctggatctttgggcacaacaaaggctggccagcaggtccctcttgtcagtgatattgtctggcctagaagatgccaaaagaagccatgtccacaccacaccagtttggtgcactctgctgagaccacacttggcctctctctgaaaagacactcaaggctcagaacatttctgttcttcatggccgcctggctcacaggatgttccctcgtagtcctgggtcgccccgcaactgctctgagatttcacctaccgggagctgctgacccaggagctgagagtgggtggtttctgtgggctgagtgtgtgggattccatgctgttcgagcagacttgtcagtctttgtacctcccgtgacagctctgcgtgtgcctttctgcaaatgtccagagtctcaagccagcatcctcaaaaagt

SEQ ID NO: 612 - DNA, 483 bp, Rattus norvegicus
cggccgccctggaacctggatatcgcgcgaggcaagccgcgcgcgggcgggcgggctatggcgcaggcgggttgcggggccggcgctggtggcagggcccggtgcatggcggtctgtcggcggagtcgccctcgggggctgtcagattggtgacccagaaggaaatctctgacctcagtggtgaccagaagccaacttcatgtctgaaggcacaagctgcagtttgtcatggaaagcttggggctgcaaacggtgaccctcagtgatgggacaacagcctacgtccagcaggccatcaaaggggagaagctgcttgaagggcaagtgatccagctggaggacgggaccactgcatacatccaccaggtgacgatacagaaagagtctttctccttcgaagatggtcagcctgtgcagctggaggacgggagcatggcctacatacaccacacacccaaagagggctatgaccccagcgccctg

SEQ ID NO: 613 - DNA, 421 bp, Rattus norvegicus
tttttttttttttttttaagaaaataaataacttttattttgtacaaaagagaaagtgtaccagagccaaaaggctgtgggtgacccagggccacgtcactgtcagagtccaagaggccttgagtgtcctagggccaagagtctctgtgcatctcatggccaagtggccttaggtgtccaggacgccagggaagccgcgctcagagcagtagcagagagcccagcagcagctcgccctggcccagtggtcgtctgcgctccagcccgcggcccttgctctcggccttgatgcgcaccgccaggcggcgcagttgctcctccgggagcccgtcgaagcagcagtcctggtccagggcggccttgcggctgcggcggaccacactggcgcgctgctggccggacggccgcagcaccaggctga

SEQ ID NO: 614 - DNA, 2645 bp, Rattus norvegicus
ctcagtccgatcggtgatctcggcccaggtccggtgttggcgtttcgctcttagttcccatctgcaccttggggttctgcgctctgctcgccatggagtccgggccgtgcagcaggcccgctgagcctcggcattgcgtgagcggccgggcgggcgcgggtttagcgttcccggcgttcccattgtccgctgccggggcggagcccgggagccgcattggaactgtagccgctgtgctgccggctgggggctgcggagaaaggatgggcgtccgcaccccgaagcagttctgccgggtcctggagaggccgctcatcagctacacactgcaggctatggagagagtatgctggataaaggacattgttgtgacagtgacaggggagaacatggaagcgatgagaagcatcattcagaggtatgggcataagcgcatctcactagctgaggccggagccacgcgccacagatcaattttcaatggactgaaagccctggcagaagatcagccaggctgtgaactcactagaccagaagttgtgattatccacgatgccgtgagaccttttgttgaggaagatatcctcctgagagttgtcctagcagctaaggagcatggggcagcaggagcaattcgacctctggtgtccactgtcgtcagtccgtctgctgatggtcacttagaccactcactggaccgtgccaagcacagggcaagcgaaatgccccaggcttttcactttgatgtgatctatgaagcgtatcagaagtgtagtgattttgacttggaatttggaacagagtgcttgcagttggccctaaaatactgtcacaggaaagcaaaacttgtagaagggacccctgacctctggaaggtgacctacaaacaagacctgtgtgcagctgaagccatgattaaggaaaaaatttcacaagagatttgtgtggtcgtgaacacaaaagatgaagaatctgtaggacatcttcttgaggaagtgctaagaaatgaactaaattgtattaaagtcacatccacagttttggatcgcaccagtggagacattgagaacttcatagaccaatgctacagtttcatctgtgtgaatgttgtgtcctctgagagtcgagaaaccaggaagttactgagtatcctcgaagagagcagccttcctcttctgtatcccgtcgttgtcgttttggtgcattgctttgatttcacggtagtgccgctcgctcagaagatggagaacctggtgtggatcagggaattagcaaaggaagcaaaaggaaggaatgttctattaagtggagtcctcctaaatcactcacaggatgagcagaagctacaagagagtttagtacaaagtgcagccatcatagctgccttggttaaggaaagaaattctgcactcgtcgggcagctcctggtggcatgaagaacacagacaaaaatcatctataagcttccaaagatccttccctaaggccccccaccccacttgactgcctcgccacctcaatgtctcttccttgtgcatacaatattttcattgttttcttatcttgccacttattggatgtgacgcttaggttgtgacaattggttaatgtgtgtgttcatgaacttatgtatcaaatacaattggctccaactagaaaaggataaataaatggaaaatattgctttcatgtaaagaatatgttcactactgcagcaagtccaattgacatgatagggttagccattccttcaagggcaagagtttagacagcttggtggttatggtaagtttatgctaattaacatattattcacattatagtggagctaatgaataggcttcagaattatacccaattccaaaatcatcgacttcctatgtgagaatgcatcttttgacttgttttggaattcactgcaccttataaagagtagggaagctgggaagttggcttagtgggcaagctcttgtctagtgtggatagagcaacatcacagaagaaaaagaaaaacatgctggtaaatattgggcagaagtcagaaaggggatgtctccagtttccttcccctttgtcttttatgttcttgatctttagagatttctaaagagactgagattcactcttttactagtttaaattgtatcttttctttggtttatgagatgtcgtgctgacattattttaaagagtctctacttcttctaggttagtttcagaaatgtctggagagcttcatgaaggttgagttgcttcggtctgtccgtgcctatgatcttctgaaaagcaggggggccagtgaagtggagttagctaatgttgatgtaggaatggtggccttgctaaatcaagattcattctttacaatctctattgcctatacattatattgtcttttatgttgcacttaataattatatatacatatggttgtgaaaatgccttttgttgcaacataaattttttattaaagtatgttaaatcattacattctagaacttacactggataaagaaattataaaagctgcatgaaatgtgtttactcaggattgtcaataaatatgtctactttctgaaatgtctcctgcaacatgttaaataaatttcctctatatttttgaatttcaaaaaaaaaaaaaaaaa

SEQ ID NO: 615 - DNA, 559 bp, Rattus norvegicus
tttttttttttttttttcacacagggttgcttttatttccacatccaacttgagcagaggccctgccacaacctgaacagctgtgaggtgctgggtgcctccagagtttctggcacagtaagtgttgggtgtgcagacttcctgatggccacatgacactggcccacacaggaacagcaagtccatgaatggaaatcccactgagctggaagtggaggctctggaaaccccatgggcagcagcaggagttaaaggagccaccaggaacactgcagtgaggctccaatgcagacagggctgataaaaacccaaacagggcattgtgagagcagaggctcgagtgtccccgctgaggacccggggctgaaggcacagagctgtgtcgggatggaagaaccctgggtgcactcgcagtccagagcacgaaagcacaggtgagaacccagcccgaggctctctgtgaagagtgtggccttggatcttgggcacggcacagtgacacacagtgctgaggtcaatcctgacttcccagaggaatgacctcttcagtgacaaaaaa

SEQ ID NO: 616 - DNA, 2330 bp, Rattus norvegicus
ggaagcggcggcgacgcggagagtccccgcgtccacacggcagccgatcgcccaccggggcctgcacccgcagcccgcgtctacgcaccgtcggtggccccgcaacctgtcgcgccccgcggacccggccgcagcccccagtgtcgcgctcgcctgagtcaccgccatggccgagagcgcagagagcggcggcccaccgggcgctcaggacagtgcggccgacagcggccccgcagagcccaagatcatgaaggtcacggtgaagacgcctaaagagaaggaagagttcgctgtgcccgagaacagctcggtccagcagttcaaagaggaaatctcaaaacgtttcaaatctcatattgaccaacttgtgttgatatttgctggaaaaattttaaaagatcaagatactttgagtcagcatgggattcatgatggacttacggttcaccttgtcatcaaaacccaaaacaggccgcaagataattcagctcagcaaacaaataccactggaaacagtgtgaccagttcaccagctcctgacagtaaccccacgtctgggcctgctgctaacagctcctttggtttaggtggacttggaggacttgcaggtcttagtagcttgggtttaaataccaccaacttctctgaactacagagccaaatgcagcggcaacttttgtctaaccctgaaatgatggtccagatcatggaaaacccctttgtgcagagcatgctctcaaaccctgacctgatgcggcagctgatcatggccaacccacagatgcagcagctgatacagagaaacccagagatcagtcacatgctcaataacccagacataatgcgacagacattggaacttgccagaaacccagcgatgatgcaggaaatgatgagaaaccaggaccgagccttgagcaacctagaaagtatccctgggggctacaacgccttacggcgcatgtacacagatattcaggagcccatgctaaacgctgcgcaagagcagtttggtggtaatccatttgcttccttagtgagcagtccgtcctcagcagaagggactcagccttctcgaacagaaaatagggatccgctacctaacccttgggctccacagactccccagagctctccagcctctggcagcactggcagcaccactaacacagtgagcacctctgctggcaatgccaccagtaccccggcgggacagggcacctcagggcccaacttggtgcctggagcaggagctagtatgttcaacacgccagggatgcaaagcttgttgcagcaaataactgagaaccctcagctcatgcagaacatgctgtctgccccctacatgagaagcatgatgcagtcactgagccagaaccccgaccttgccgcacagatgatgctgaataaccccctatttgctgggaaccctcagcttcaagagcaaatgagacaacagctcccaaccttcctccaacaaatgcagaaccccgacacactgtcagccatgtcgaaccctagagccatgcaggcgctgctgcaaatccagcagggcttgcagacgttggccacagaagctcccggcctcatcccagggtttactcctggcttggcagcgggcaattctggaggccctgcaggaaccactgcacctagcactgcacctggtgaggatacgaacccccaagggggcgctgctgagccaggccaccagcagtttatccagcaaatgctgcaggccctcgccggggtgaaccctcagctgcagagtccagaagtcagatttcaacagcaactggaacagctcagtgcaatgggattcttgaaccgtgaagcaaacttacaagcactgatagcaacagggggcgacatcaatgcggccattgaaaggttgctgggttcccagccgtcatagcagcatttctgtatcctgaaaaaatgtaatttatttttgataacggctcttaaatctttaaaataacctgctttatttcattgggattctgtgctgttgtaaaggaaaccaataggaagtctctggaggtggagtgcagtaagatgtgcgggtttctgtgtctttggaacagtgggaatcgatgtctctggttaaggccgctgcatgcgtcaaacacttggcatttgttgtaatcttttaaacatcaccttttctaattgggtgaacacatttttgtcctgcatctgtccaactaacttgctttttaaacatagccctctggtagtaatttatgtagaataaaggcattaaaaagcagataaaaaaaaaaaaaaaaaaaaaaaaaaaaaaaaaaaaaaaaaaaaaaaaaaaaaaa

SEQ ID NO: 617 - DNA, 499 bp, Rattus norvegicus
tttttttttttttttttagttttggggaaagatttattctttgtagggggtgtggccagtgattcccatgttccagtagctcctcttacaccatgtatatatgggcagcacaactggatttaatgattgttttaaaaagagacgtgaggttctttgtgggacgtgttagggggtacacgaaggaagttagaggaaatgaggagtatatataatcatatttcattgtagacatgtatgaaattctcaaagataaagaaaaattaaatttacttactgattgtgtgtattgctatggtctgtgcacgtatgtatgtatgcacagatgtatgtatgcacagatgtatgtatgcatgtatgtctgtgtgtacaagtataattgcttataaagggttgatgatacttcagcctggtatttacagccatcgcagctccatcacagtgtgcacagcccacctgatcccagcccttctgtcgcttgcttgttttctcttcgttcctt

SEQ ID NO: 618 - DNA, 469 bp, Rattus norvegicus
tttttttttttttttttactttggaactcagtactttttatttacaaaaaacgaaaacaaaaaggaggaatctaaagctgatccactggagacacaggagtgatgtggcaatggtgggggctctggctctggggaggcacaggggtcccagcctctcctggcgtccccacggtgaccccaccttgcctcaaaggctcaatcaatggtccagcagttgggccactacccactctgggtacaagcgatttccaggagcctgagttcccagctcaagggagctggaatgacaggggaaactgaggccagagaatgccctggtttctgctacccgcctcactgtggtgtgatcttggcagcctcagcccggatgagggcaatgaggtcctggttgatgaggaagacaaatcgcaggctggcgatctccaccacagagttgttgctaaggcgccacttggagccacacagcaca

SEQ ID NO: 619 - DNA, 552 bp, Rattus norvegicus
  misc_feature (1)..(552): n = a or c or g or t
tttttttttttttttttgacaacaggatgctgcattctaaaactttcagagttttagactatctatgacatgctgttctctccatcagcatagggtagaggtcaaggccttatttgcccgtgtattctgcatgccactgggctttgaaatgtgaaaaaggaaaaaagaaaaaaaaaaaaagcaaagcaaaccccagtggcatagtcagttccgtttgttttgtttttgacaagcaagacttcccgcttgtttttaacgttgagttgagagcggttttgttttttttaaacaaatcatggagctgaagcatttttaggattgtcggtgcttagtagacttgatgactattttaaaactgcgtgaatttagtgaaaaatctttttttctcactctgcatgtgtaagtgtttgtagcctggcccctcctccagggcanaaagacctgtgccgactaaaggtttgggtttcttttcctccagtaaaaatcttggtaccttatttgatgtttacattaagatatgacattacacatggcaatgctaagatttttttc

SEQ ID NO: 620 - DNA, 2436 bp, Rattus norvegicus
cgctggttcctcaaggagcggagacggcaaatggcggacttcgatacctacgacgatcgggcctacagcagcttcggcggcggtagagggtcccgcggcagtgctggtggccatgggtcccgaagccagaaggagctacccacagagcccccctacacagcttacgtaggaaatctcccttttaacacagttcagggtgacatagatgctatctttaaggatctcagcatacggagtgtgcggctagtcagagacaaagacacagacaaatttaaagggttctgctatgtagaatttgatgaggtggattccctgaaggaggctctgacctacgacggtgcactcttgggtgaccggtcacttcgtgtggacattgcagaaggcagaaaacaagacaaaggtggctttgggttcaggaaaggcggacctgatgacagaggaatgggtggctctcgagaaccgagaggtggatgggattcccgggatgacttcagctctggctacagggatgacttcttagggggtagggggggcagtcgccctggggaccggcgagcaggccctccaatggggagtcgctttcgagatggccctcctctgcgtggctccaacatggacttcagagaacccacagaagaggaacgagcacagagaccgcggctgcagcttaaacctcggacagtggcaacacccctcaatcaagtagccaaccccaactcagccatcttcgggggagccaggcccagagaggaagtggttcagaaggagcaagaatgagcttaggttgggagggaatggggtgtgggggagctggagcaagagcacagcctggtggcaggcagtcgccctgcaggccccattcccgcctggcactgtcctccttacagcgggaacacagagcttgcgagtgcatgtcagctgttaacaagtggtttctagtacattcttggctttgctgtatctatctagtgcctgttttgtgctttctttctgttttctttctctcccctctcactcctggcctctccctgctccttcccacgccgtgtggatgtcggtcacgtgtggaaggtgggctgaggtgcctcatcctttgctttctttctttcctttccgcgccctggccacgctccgggtgtgctgtcctctgctttttctcagagcttctctccaatctgcatgtcgagttctgtgttgctgtggcttctgggaaagagctggggccactagctaggcggctgtggtggcctgttggtaggtatccagctgggatgagcacacagaattggaggcatcttgctttaaaacaaggaaactgccttctggtcccgagaggctgctgtgtttggggtcagtcacctgccccaagcagcctgttcaggtatagcaggctcctgtcaaacagtgaggccagaagggtgcagggaattgggacattctgctctggtggctctgggtgccagtggccatgtggctttgctcctgctcgctctaagaccaagtggaagctcattccctgctcttcctgggccgtggaggccccttgggggtgcaacccgctgcagctcaatccgcttcctgcagccgaggcctgtaggaagcaggggtggtgctggagctgcaccgggcagctgtgcctgcactgagtctgcgctctttcccttgtgtctgtctgctccagggcgcttagcccaaaaggctgctccccaccacagctcaaggcctagagtctggcactttctctgatcggttgcacagctgttgagaacctcagtacctgggtgtctagaaacctctaggcttgctgcttgctctgtggggcagaccctgctcccacagacagtgctgagcactcacttgagagcaaggggatcaatcaggctttgctttagctcggacagctgtgtgtgaacaaatggaaagtgatttggcaccgagtctccatctgttccagtcggagcaggtaggggtcagccagccactagagccttgggaaagaagggctgaggtgcgcagcttgctcgttagccagcagcttcctgccagccaccccttggctcatgattgtctttgtcgcaaggtctcggcaatttacagaactctcactccttccctcgcctgccatcttctctgcttctgagataagaaccatttgtgtaacaccaatacctaacttaagacagacatgcattgcgtggttgtaatcaaagctgatgctttcagatgatctaatccatctccaatgcggaaaagacagaacaggcacgtccatccacactgctgggcgcccagctgactctgtaagaatggaattccaaacacttaacacattcagttctatgacagaaagtgagtctatggatatggtattttgtgaatgatcttttaaataaaagagaaccttacataacaaaaaaaaaaaaaaaaaaaaaaaaa

SEQ ID NO: 621 - DNA, 472 bp, Rattus norvegicus
tttttttttttttttttcaatgcttccaacaactttattcataacaggcaaagcctggaaacaacccaaggaacaatgtcagattttataaaatggaatatactcagcaataaaaatgaatcaattatcaatgcatacaataacatgaaaaaagcagttaaagtacaagaatgggaacataaacgaacaaataatgtttagcccattaactactgtttgagaggagatagtagaaagacacaaagatacttttgaaatgaaatataatgaaaatgttttatatcatagtagtagagttcgttacattatatatacatttaacaaatcatagtgtatacttaaatttttagttttacttacataaaatgtacatcaaatttattaccaaaaactgatggttgttgtatggacaaaacagtgtgtgacacactgttgaccaactacaacttccacaacaagatttttttttttt

SEQ ID NO: 622 - DNA, 1300 bp, Rattus norvegicus
cgcgcctggctctgcggtctcggcaacacagccagcatgcagcagccacccacagcagaatccttggctccttctacagagcccagcaagcccccttacagctacatagccctgattgccatggctatccagagttcaccgggtcagcgcgccaccctcagtggcatctaccgctacatcatgggccgctttgcattttaccggcacaaccggccaggctggcaaaacagcatccgccataacctgtctctcaacgagtgcttcgtcaaggtgcctcgtgatgaccgcaagccaggcaagggcagctactggaccctggatccagactgccacgacatgttccagcacggcagcttcctccgtcgccgcagacgcttcaccaagcgcacaggtgcccagggcaccaagggccctgtcaaggcagaccacagaccccttagagccaccagcccggatcaaggagcccccaacaccacaactggcagactgtgcccattcccaccagaggtgccaaaccccaagggctttgggggtctgatggggtcattgccagccaacatgtgcccaacaaccagtgacaccaggccccagctgcccactggacccaaagacatgtgctcggcaaagtctggaggtccaagggagctttctgaagccacctcgccctcaccatgcccggcattcggcttctcatctgccttctctgaagctgagagtctcggcaaggcccccacacccagtgtggctccggagagcatcgggagcagctaccagtgccggatgcagacgctgaatttctgtatgggggctgacccaggccttgaacacctcttgacctctgcagtcgccactcctggatcctcaacaccttcggcctctcaccgggctccactgcccctgccagctgactccaaggaaccgtgggtgcctgggggcttccctgtccagggaggttctggctatccactgggattacccccttgtctttaccggacaccgggaatgttcttcttcgagtgactgactgcagcagcccctctgtagggcttctgtcaactgttccctggagactcagactggctatgtgacctagggtattctgcaagaacccagccctggcaggccaaggactgtgaggaccggaaggcagaagtgagcagtcagccaggtccctggggggacctactgacaaacttgggatgtggggaaatggaaccctcaacatttttctctgtggttctcagggctaataaagccagtgagatgataaaaaaaaaaaaaaaaaaaaaaaaaaaaaagg

SEQ ID NO: 623 - DNA, 494 bp, Rattus norvegicus
attttttttttttttttgcacttctgtgtttaataagtcacatcttcagttgctcctggggtggaatgtgagaccttgactcttgtagtgatgtcagtgggtgggcatgaggctgtgaagaacatctttctgccacacagatgacatctctggagtaggtacatgtgcacgaggagctccatagtttcacccacagtacacctgctacaaagtccctgtaggcaatggctgccaagtggctatgtgacatctaacaaagacagtggacacctgaggtagctagtagcccagcagagacaggagtacaaccattagaggaggcagatccaagaccacaatgctcttaggaaccatagtgctctcaggatgtggtgttttcatggggacattggccacccacccccttgggggagggtccacaactatctggcttgcagctcactcttactgatagtcctaagggctaaaatgatgctggtggactctcagggcga

SEQ ID NO: 624 - DNA, 392 bp, Rattus norvegicus
tttttttttggaacattcctttgaaattttgagaaacttgcaactcttcagtaatcactcccgatgtttcttgtacggggccgcgggcctcttggttgttttcgagcattttcttaaaaaaaaagaaacaagagggacacaacagttttaaaccggaagatttccgcagtccgtgtaagcatgtttacctgttggtttgctttctgtgtctgtgaaatgaatgtcatgtgtaaatgccaacctaaggcaacagcgtctcataactgagtgactgcagtgacttgatgctctacatcattgtagaatttactgctatatggttttaatccttgaacctgtgattgtgacccacgatgggggacctttcagtgctaaagctgatcatgtgtgta

SEQ ID NO: 625 - DNA, 433 bp, Rattus norvegicus
tttttttttttttttttggtaactgttaaagaataaaggctttttaacccatttttgaagagggtgaagtttggagaacaagttttaaaaccatcagtcagatgagattttttctagtttggaaaagggatagaggactctcacacacacacacacacacacacacgaaaacttgaaatggctttactttggctgtcttttcttctgacattgcgaggggagtttgtaattactatattctagtttggagtacttgctgtaggatacaagctgtctttgcactagctctaaagaagaatttcttctggttttagagaactgattttgttttagcattaaactgttgaagttttgtacgtagacacctaggtcctgcagtcaggttggaagctgcgtgcactcactgtctaaacccttgagggctggattgatt

SEQ ID NO: 626 - DNA, 1017 bp, Rattus norvegicus
ttcaaagtcctaaaacgcgcggccgtgggttcggggtttattgattgaattccgctggcgcaggatcctctgcagaaagagagagcgcgagagatggagatggacaaacggatttatttagagctgcggaacaggacgccctctgatgtgaaagagctggtcctggataactgtcggtcaattgaaggcaaaatcgaaggcctcacggatgagtttgaagaactggaattcctaagtacaatcaacgtaggcctcacctccatttccaacttaccaaagttaaacaaactcaagaagcttgaattaagcgaaaacagaatctcaggggacctggaagtattggcagagaaatgtccgaaccttaagcatctaaatttaagtggcaacaaaataaaagatctcagcacaatagagccgctgaagaagttagagaatctcaagagcctagacctgtttaactgtgaggtgaccaacctgaatgcctaccgagaaaacgtgttcaagctcctgccccaggtcatgtacctcgatggctatgacagagacaacaaggaggcccctgactctgatgttgagggctacgtggaggatgacgacgaggaagatgaggatgaggaggagtatgatgaatacgcccagctagtggaagatgaagaggaagaggatgaggaggaagaaggggaggaagaggacgtgagtggagaggaagaggaggatgaagaaggttacaacgacggggaagtggatgatgaggaagatgaagaagatgctgctgaagaagaagggagtcagaagcgaaaacgagagcccgatgacgagggccaagaggatgactaaggggaattaacctgtttggggaaattcctattgtgatttgactgtttttacccatatcccctccccctcctattcctgccccccgaaacttatttttttctgattgtagcgttgctgtgggaatgagaggggcaaagtgtactggggattgccgggggtggggtgggggtgggaggggag

SEQ ID NO: 627 - DNA, 2180 bp, Rattus norvegicus
gggttcttccttcatatgccagctagagagccttgcctccctggagctcatagtccaggctgtgttctggggacctgaggggtgtggtcagggcacagagactctctcagagcactgggagtgggattcctgctgtaagggaagggatgtcataggtcagttgaccaatgaccagacctaaacatggctcccagccttaggcatgcggagcctaggagtcccttcaaccctggcctgtgatttttccagctcagatgacaaagacatctaggcccagtgtcttgagaatccctatagtcaaggattagagtcctcctcagtgagtcagctcccccagtcagtaccctcacaagatatcaaccgaattcggtttttttttttttttttttttaaatatgtaaggctttcaatttattacagatcacccaagaacataatgatatacatgtagtcagaaaacacgatgtagaaatcatagtgagttgtccagacatagtcagtagattattctttctggcatgctccagtgtcaagacctcaataaagagcactaaaatccttccatacaattaagtatcagcgatgtaccatattgcagaaaggggtggctgagcaacagtttgttgatactataagacttccatgctcaacagtcgtagcgttgcactcagcacagctctggtttccatatacaaattttccatctcgtaggggagcgcggctagtgccgctgccgcttccaccgcagtaactgccagatcttccaacatcacgttcagctttgtccgtcaacctgtctgacatgtcgggacccgtgccaagcagggccagagtttacacagatgttaacacacacagaccccgagagtactgggactatgaatcacatgtggtggaatggggaaatcaagatgactaccagcttgttcgaaaattaggcaggggcaaatacagtgaagtgtttgaggccatcaatatcacaaataatgaaaaagttgttgttaaaattctcaagccagtaaaaaagaagaaaattaagcgtgaaataaagattttggagaatttaagaggtgggcccaacatcatcacacttgcagacattgtgaaagaccctgtgtctcgaacccctgccttggtttttgaacatgtaaacaacacagacttcaagcaattgtaccagacgttaacagactatgacattcgattttacatgtatgaaattctgaaagccctggattattgtcacagcatggggattatgcacagagacgtgaaaccgcataatgtcatgattgatcatgagcacagaaagcttcggctaatagattggggtttagcagagttttaccatcctggccaagagtataatgtccgagttgcttcccgatatttcaaaggtccagagctacttgtagattatcagatgtacgattatagtttggatatgtggagcttgggttgtatgctggcaagtatgatcttccggaaggagccatttttccatggacatgacaattatgatcagttggtgaggatagccaaggttctgggaacggaagatttatatgactatattgacaagtacaacattgaattagatccacgtttcaacgatatcttgggcagacactcccgtaagcgatgggaacgctttgtccacagtgaaaaccagcaccttgtcagccccgaggccttggattttctggacaagctgctgcgatacgaccaccagtctcggctcactgcaagagaggccatggagcacccttacttctacactgtcgtgaaggaccaggctcgaatgagttcggctggcatggcagggggcagcacacctgtcagtagcgccaatatgatgtcagggatttcttcagtgccaaccccttcacccctgggacctctggcaggctcacccgtgattgctgctgccaactcacttgggatacccgtaccagctgccgctggcgctcagcagtaatgaccccatctgtcttctgatgcctgggcagaggtgggacgtccaccctctccttaatgcagcttgcgcctggttgggaggggtgagaacacttcagaagcaccgtgtctgaaccgttgcttgtggatttagtagttgagtcataaaaaaaattataggctgattttctttcttttttttttttttttttttaaaaaaaccg

SEQ ID NO: 628 - DNA, 426 bp, Rattus norvegicus
ttattttttttttatttgacaagcagcaacatcatgtttgtcattttaatgtagatacaattattaggttatctgtcatattacaatatttaagtttttagtttatgtcctttaagatacattttaaaaaaaaaaaaaaacacatcaactgcaaacgtgaaggggagaaagcatggtacccagccgaattccacatctcagcaatacttcactcattcttttaataaagttttaagaaacgtcataatgacatgagcttgaatatctctaggcattttctctgacgctcatgacgtggcactggtgatgttgtaaacagcagaaaaacaggggctgccagacgaccaaagtatggaggcacaggcctgctttctcccacaggagctcaccaaatggggatggcaatgacctcacacccgcaccatg

SEQ ID NO: 629 - DNA, 3205 bp, Rattus norvegicus
ttactatggcatcggtagtgtcctgacagttcggaaagcaggaaagcaagcgccgagaagaaaggctcgggcccagcggactcttacatcgcaacccatcaaggaattgttattttgggtcctgcaagtggggtccggtccaacttgaggtagcgtgaaggccccttcaggcggcgccgcgggcagccccgcagccggggcctggtgcagccgccgcggccgctgtcagggaagcgcaggcggccaatggaacccgggagcggccgctgctgctgaggcggcggtgtcggcagtccgaccccgaccgcctgcaccccctccgcgagggtcccccggagcttggaagctcgaagtctggctgtagccatgggagacatggtagtggagcctgccaccctgaagccaacttctgagcctactcctagcccatcagggaataacgggggctccctactaagcgtcatcacggagggggtcggggaactgtcagtgattgaccctgaggtggcccagaaggcctgccaggaggtactggagaaagtcaagcttttgcatggaggtgtagccatctctagcaaaggcagcccactggagttggttaatggggatggtgtggacaatgagatccgttgcctagatgatccacctaccgagatcagggaggaagaagatgagatggagcctggtgtggtctctggcacagccaaaggaacaagaagaagacgacagaacaactcagccaaacagtcttggctcctgaggctgtttgaatcaaaactatttgacatctctatggccatttcatacttgtataactccaaggagccgggagtgcaagcctacattggcaaccggctcttctgctttcgcaatgaggatgtggacttctatttgccccagttgcttaacatgtatatccatatggatgaggatgtgggtgatgccattaaaccctacatagtccaccgttgtcgccagagcatcaacttttccctccagtgtgccctgttgcttggggcctactcttcagacatgcacatttccactcaacgacactcccgagggaccaagttacggaagctaatcctctcagatgagctgaagccagctcaccgaaagagggagctgccaactttaagcccagcccctgacacaggactgtctccctctaaaaggactcaccagcgctctaagtcagatgccacggccagcataagtctcagcagcaacctgaaacgaacagccagcaaccctaaagtggagaatgaggatgaggagctctcctccagcaccgagagtattgataattcattcagttcccctgtccggctggcccctgagcgagaattcatcaagtccttgatggcaatcggcaaacggctggccacgctccccactaaagagcaaaaaacacaaaggctgatctcagaactttccctgctcaaccataagctccctgcccgagtctggctgcccacagctggctttgaccaccacgtggtccgtgtgccccacacacaagctgttgtcctcaattccaaggataaggctccctacctgatctatgtggaagttcttgaatgtgaaaacttcgacacaactaatgttcctgcccggattcctgaaaaccgaattcggagtacgaggtctgtggagaacctgccggaatgtggtatcactcacgagcagcgggctggcagcttcagcactgtgcccaattatgacaatgacgatgaagcctggtcggtggatgacataggcgagctgcaggtggagctcccagaagtgcacaccaacagctgtgacaacatctctcagttctcggtggacagcatcaccagccaggagagcaaggagcctgtgttcattgcggcaggggacatcagacggcgcctttcagaacagctggctcacactcccacagccttcaaacgagaccctgaagacccttctgcagtcgccctcaaagagccctggcaggagaaagtgcggaggatcagagaaggttccccgtatggccatcttcccaattggcgactcctttcagtcattgtcaagtgtggagatgaccttcgccaggagctgctggctttccaggtgttgaaacaactgcagtccatttgggaacaggagcgagtgcctctttggatcaagccatataagattcttgtgatttcagctgacagtggcatgattgaaccagtagtcaacgctgtgtccatccaccaggtgaagaaacagtcacagctctccttgctcgattacttcctgcaggagcatggcagttacaccactgaggcattcctcagtgcccagcgcaattttgtgcaaagttgtgctggctactgcttggtctgctacctattacaagtcaaggacaggcacaatgggaacatccttctggacgcagaaggtcacatcatccacatcgactttggcttcatcctttccagctcaccccgaaacctgggcttcgagacgtcagcctttaagctgaccacagaatttgtggatgtaatgggcggcctgaacggtgatatgttcaactactataagatgctcatgctgcaagggctgatcgctgctcgcaaacacatggacaaggtggtacagattgtggagatcatgcagcaaggttctcagcttccttgcttccatggctccagcaccattcgcaacctcaaagagaggttccacatgagcatgactgaggagcagctgcagctgctggtggagcagatggtggacggcagcatgaggtccatcaccaccaaactctacgatggcttccagtacctcaccaatggcatcatgtgacaccactttcaggcccagaagtggtgggattgaaggcaccctccttaggaggacccttgcctaagaaaacctaaatcacaaaatcccacctacctaaccacctacccaagggaaatggaaggcaaaaaacacaaaggatcatgtggtaaccatgagagctggccaaagggtaggagagccaaccatggggtccagacttgctggggcttccccacctcttgctgtgtcagtattgccacctgacagatcccaggactcactgccctccagagaacagagatgatgaacatgaggaggactggaaccttcttcccctcggggatctcatcttttactatccctgggtcccagcaagatgggaggagtgggttcttggtacttaggactt

SEQ ID NO: 630 - DNA, 440 bp, Rattus norvegicus
tttttttttaagaagccttgaagggaatgtcaaatctattgtcttggtatatgtaatccatctccataaaaggagaccgtataatgcctgagtaagcagaggacttgctgcttctgcgcccactgttttgattaaaactgagaagtgggcaggtgagagggctcagcaagtagaggtgcttgctgccaaacacagagacctgagttcgagtcccccgggcctacatggtagaaggcgagagctagcttctgcaagttgtcctttgaccaccacacatagataaataacaaatgtaatttaaaaaaaaattttaaagaaagtttaatttaagaaaaaaaaaacaacagaagttttagactgttctcaggttgggaaatatttttttcccactttcctaaggtgtttccccctttgctacgttaattatcacagccttgctt

SEQ ID NO: 631 - DNA, 1493 bp, Rattus norvegicus
ggcctctggactgcctgtggcagagcttaactggaagcaggccaagttgggcatctttgcgtgaaagcagagctcagcgtggggagcgaacccaggccaggaaccgatgatgtggcgatggacgcttatgttgcttctcttactgctgaggcactgggccctggggaagccatctcctgatgcaggacctcatggccaggatagggtgcatcatggaacccccctgagtgaggccccccacgatgacgcccacgggaatttccagtacgaccatgaggcgttcctgggacgagacgtggccaaggaatttgaccaactcaccccagaagaaagccaggcccgacttgggcggattgtagaccgcatggaccttgctggggacagcgatggctgggtgtccttagctgagctccgcgcgtggattgcgcacacacagcagcggcacatccgtgactcggtgagcgcagcctggcacacctacgacacggaccgcgacgggcgcgtgggttgggaggagttgcgcaatgccacctatggccattatgagcccggggaggaatttcatgatgtggaggatgccgagacttacaagaagatgctggctcgggatgagcgccgattccgggtagctgaccaagatggggactccatggctactcgggaagagctgacggcctttctgcatcctgaggagttccctcacatgcgggacatcgtggtggcagagaccctggaggaccttgacaagaacaaagatggctacgtgcaggtggaagagtacatcgcggacttgtactctgcggagcctggggaggaggaaccggcctgggtacagacagagaggcagcagttccgagacttccgggatctgaacaaggatgggcggctggacggcagtgaagtcggttactgggtgctgcctccgtcccaggaccagcccctggtggaggccaatcacctgctgcatgagagcgacacagacaaggatggccgactgagcaaagctgagatcctaagcaactggaacatgtttgtgggtagccaggccaccaactacggtgaggatctgacaaggcaccacgatgagctctgattccccggtctgctcagacttctgaccccatgaccacatgggggcaactgcggggggccactgcagccagcccctccctccaggacacagactcagctctggtgttcctggttcttgggccctcagtcaccttctcttccagagacccctgtcaccagccctggtaccccccccaacctgcccaggacactcaggcacttaaatgacactgataccatccccagcacagacccaggggaccacatcctgactgaacctcaatctgaactaaaacagcacaagctaacctgtcctgcctaggagcaataaaagctgttgctggggaaagaaaaaaaaaaaaaaaaaaaaaaaaaaaaaaaaaaaaaaaaaaaaaaaaaaaaaaaaaaaaaaaaaaaaaaaa

SEQ ID NO: 632 - DNA, 216 bp, Rattus norvegicus
cccagccccaaagttttattaccaacggggcacattcgagttcacaccccagggggtacagcttaaaacacggacagtgacccgccccgccccacggcttccgtgaagagttgcttgccaaagcacagcttcttccagggggtccccagcagggcattgcttagcccaaaggttccgggggtcaagacaataggctcaggccccccccggtttcca

SEQ ID NO: 633 - DNA, 459 bp, Rattus norvegicus
catccatttaaattatatattatgactgtgccttctcggggcagcatcaataaggtaaggtaaagcttagtccttgagtcctttgtttaccaacataaactaactaaaaggacatgccacgtagttaaaataaactaatcttgtttattagatacatgagcaaacaaaaatagaccatggctctgacttgcaaccctgttcccttccagtgtcaaggagctagcatgttccagaagtctgaggcttaactgtacaaagacttgcctttcatgtcccagggagaccatgagtaagactgggtcacaaaatgaggaaggccctacctctgagactgagtaaattgcttaaagaaacagtgcatggaaaagaatgttcacttcctaggaattgttctaaggcttaaatgctctacgggcaagtcctgcgttctacttacagcagtagcagcatgcctcccca

SEQ ID NO: 634 - DNA, 397 bp, Rattus norvegicus
gctgtggagccgtactcactgcagacccagaaggaggaggagcacctgctttctgccactccgtagcctcggccgccattctccgcacgtacgcgccgtccacacacatcaggatgttctccggcttgatatcagtgtggatagtctaagccctgaaggacctgtcgaatgatactcttcacacagcggactgggaggccttgatagttggacttgatgatccatttgaggagatggtgaccaagtacttcgaagaccatgcagacatgtatcccattcatgcctgagatcttgaagtcatcgattagctggactaccatgtctttgtttgggtcactggggtcactttctcgaacacatttgagcaatttaatttcaatccaagctgtctctgtat

SEQ ID NO: 635 - DNA, 314 bp, Rattus norvegicus
gacattaaaacaaacagtgaaatgcagcacagcaaatattcggaaatcccaatgtcccgtgacaagatttaaaaacagatcctgctggtgcctgggtgttagggatgaagtttcttgcaagtaggggtaaggctgtctttggagaatcagtctataatgggaatctgcttccaaaacacagatttgggtttctagtacagctccgtagtagagcaaaaaacttaaccaggttgaggtcctggcactcccctacccgaattcaaattgcagaaatgcagaagctgtcaaggcttggtatttaggttagcttctgt

SEQ ID NO: 636 - DNA, 349 bp, Rattus norvegicus
attatgacaaccccctacccagtagatcgggcaggagcctcccccaagccccccattctataggtgaggaagcagaagccagtgctgagctgttctcagcagtctgctgacagcctagaggcagtgggagaagtctgggagctttctgtacttgggggaggaaacatctcctgcagctcaggctggcgctgtgaggcctgaggtgccgggtgctgatgctgcagcctccttccatttgcttatcactctctgttttcagctgtcgcagtgatccagtctattccagtattcaacgagtcaggaaggttcagttttactttgccatatccattgaggatgaaagtcagat

SEQ ID NO: 637 - DNA, 2590 bp, Rattus norvegicus
ggcgcggcgcctccgctctggcccgagatgaatgctgcggcagaagccgagttcaacatcctgctggccaccgactcgtacaaggttactcactataaacaatacccacccaacacaagcaaagtttattcctactttgaatgccgtgaaaagaagacagaaaactccaaagtaaggaaggtgaaatacgaggaaacagtattttatgggttgcagtacattcttaataagtacttaaaaggtaaagtagtgaccaaagagaaaatccaggaggccaaagaagtgtacagagaacatttccaagatgatgtcttcaatgaaaggggatggaactacatccttgagaaatatgacggtcatctcccaattgaagtaaaggctgttcctgagggctctgtcatccccagagggaacgtgctgttcacagtggaaaacacagacccagagtgctactggctcaccaactggattgagactattcttgtccagtcctggtatccaattacagtggccacaaattcaagagagcagaagaaaatcctggccaaatatttgttagaaacttctggtaacttagacggtctggaatataagttacatgacttcggctacagaggagtctcttcacaagagactgccggcataggggcatctgctcatttggttaacttcaaaggaacagatactgtggcgggaattgctctaattaaaaaatactatgggacaaaagatcctgttccaggctattctgttccagcggcagagcacagtaccataacagcgtgggggaaagaccatgaaaaagatgcttttgaacacatagtaacacagttctcatcagtgcctgtgtctgtggtcagcgatagctatgacatctataacgcgtgtgagaaaatatggggtgaagacctgagacacctgatagtgtcgagaagtacagaggcaccactgatcatcagacctgattctggaaatccgctcgacactgtcctgaaggtcttagatatattaggcaagaagttccctgtctctgagaactccaaaggctacaagttgctgccaccttaccttagagtcattcaaggggacggagtggatatcaatactctacaggagattgtcgagggaatgaaacagaaaaagtggagtattgagaatgtctcctttggttctggtggcgctttgctacagaagttaaccagagacctcttgaattgctccttcaagtgcagctatgttgtaaccaatggccttggggttaatgtctttaaggacccagttgctgatcccaacaaaaggtcgaaaaagggccggctgtctttacataggacaccagcagggacctttgtcacccttgaagaaggaaaaggagaccttgaagaatatggccatgatcttctccatacggttttcaagaatgggaaggtgacaaaaagctactcgtttgacgaagtcagaaaaaatgcacagctgaacatggagcaggatgtggcgcctcactaggctttgtgtgagtgggtggttgtgtgtgcagtgtgtgtgcatacgtgcgcgcatgtgtgcgcctgtgcgtgtgtactaacagtcattgtacagatgtgtgggtttgtttatgatacactgcagccaggttatttgttggtttatggacatactgccctttttatttttcccagtgtttagatgatctcaaattagaaaacacttataaccatgtgcaagattaatgctaagtaagcttcttagggcctttgctaatagatagtaactcaatccggtgttgatcttttcacaagtaacagaaccaagaaacttttctatataactacaatcacataaaacagatttgcataaattaccatgcctgctttatgtttatatttaacttgtatttttgtacaaacgagattgtgtaagatatatttaaagtttccgtgatttaacagtctgtttccaacttttcatgatttttatgagcacagactttcaagaaaatacttgaaataaattacattgccttttgtccattaatcagcaaataaaacatggccttaacagagttgtttgtgttgttgtacatttggaaattatgtcaggacatatacccaacagaattactaacatcactgcccttgtagaatatgcagtaatcattgtccactgaagagaatcatggttcttccgcgatgtttaggcattgtacagttctgtagcctggtcattgtattgtaccagtgatgccaaatcccgaaggcctgttctgcgattttatatgtcggatattgcctgtggctctaatatgcacctcaagattttaagaagataatgtttttagagagaatttctgcttccactatagaatatatacataaatgtaaaatattaaaagtggaagcagtgtattttaaagtaattacacttctgaatttatttttcatattctatagttggtatgacttaaatgaactgctggagtgggtagtgagtgtacttattttaaatgttttgattctgttatattttcattaagttttttaaaaattaaattggatattaaactgtaaaaaaaaaaaaaaaaaaaaaaaaaaaa

SEQ ID NO: 638 - DNA, 627 bp, Rattus norvegicus
ggcatttcaaatgctactgctgtgagtaggatttattttaagaaatgaacgacagctgatacaaaatgtttgcctccaagaagtatgtcatacttacaagggaaaaggtaattaatattgaacattttccttgttcaacggttctaatttttataagggttttataagtctcatagtcactaagcaggttctttttgaaaggtaggcttcatgacccatttgacttcgtgcctttacatgacatgacaaattattttattcaaattatgttttccaaaagagagggttctgtgctagtcgtctttgaaagttttcataccatttcagaaccacatttgctgggatgaacatttccgatggatttggtgtcatctgggcctgagagagagcaaatgatgaagcaaaattgtagaagttgtccaacatcttctgtgtgaactgtgtgaaggagtcaaccgaggacacagcggcactgcctacgggagtctgctgagccaaactgtccaacaactccaccgagattccaatctgggcaacagatggggttcgcacaatattcatggctccaaatgggtgctggcttccttctccagatttaagacctgatattttgaagatggcacttgg

SEQ ID NO: 639 - DNA, 3360 bp, Rattus norvegicus
gccttgcagcggcgcgggcaaacggagaggccgcgggaggcgcgaagccggcagaaggcgagggagagcggagggcggccatggtccagccctgaagccaaacaaaaaaggcctacttcgaaagctgtcaacaatgaatgactctaaagatgcccctaagtcctatgacttcgacctgatcatcattggaggaggctcgggaggcctggcggcagctaaggaggcagccaaatttgacaagaaggtgatggtcttggacttcgtcacaccaactcctctcggaacgaatgggggtctcgggggaacgtgtgtgaacgtgggctgcatacctaaaaaactgatgcaccaggcggctctgttaggacaagctctgaaagactcacgcaactatggctggaaactcgaggacacagttaagcatgactgggagaaaatgacagaatctgtgcagaatcatatcggctcgctgaactggggctaccgagtagctctccgggagaagaaggtcgtctatgagaatgcttacgggaaattcattggtcctcacaaaattatggcaacaaataacaaaggtaaagaaaaagtttactcagcagagcggttcctcattgccaccggtgaaaggccacgctacctgggcatccctggagacaaagagtactgcatcagcagtgacgatcttttctccttgccttactgcccggggaagaccctagtggttggcgcgtcctatgtcgccttggaatgtgcaggattcctggctggtatcggcctcgacgtcactgtaatggtgcggtccattctccttagaggatttgaccaggacatggccaacaaaattggtgaacacatggaagagcatggtatcaagtttatcaggcagttcgtgccgacgaaaattgaacagattgaagcagggacaccaggccgactcaaggtgaccgctaaatccacaaacagtgaggagaccatagaagacgaatttaacacagtgttgcttgcagtaggaagagattcttgtacaagaactattggcttagagaccgtgggcgtgaagatcaatgaaaagaccgggaagatacctgtcacggatgaggagcagaccaatgtgccttacatctacgccattggtgacattctggaggggaagctggagctgacccccgtggccatccaggcggggagattgctggctcagaggctgtatggcggctccactgtcaaatgtgactatgacaatgtcccaacgactgtgtttactcctttggagtatggctgctgtggcctctctgaagaaaaagctgtagagaaatttggggaagaaaatattgaagtttatcacagtttcttctggccattggaatggacagttccatcccgggataacaacaaatgttatgcaaaagtcatctgtaaccttaaagacaacgaacgtgtcgtgggcttccacgtactgggtccaaatgctggagaggtgacgcaggctttgcagccactcaagtgcgggctgaccaagcagcagctggacagcaccattggcatccacccggtctgtgcagagatatttacaacgctgtcggtgactaagcgttctgggggagacatcctccagtctggctgctgaggttaagccccagtgtggatgctgttgccaagactacagaccattgcttgcttccttgtccacacccaggtgaagttcaggaaggctcttgggttcttggcaccaattcaaggtgctatcctaaggccaccaggtccctgggatcttgtgggtaggaggtggcaggtagaagaaggctgcagcatcgcactggggtcaccatgacggactcagactgacattcggcagagcatcacggtgcgtccatgaagtcactagcctcaagcccaagtggtgggcagtgacagaaagctgtcgatctgttgggttcaacctttccctgtagactgttttagtctcgccttcaagctatgtaatgtcaattctgttttttcttttctccatggggttaatgatactagaggtagggaatgttagcaatcagtttttgtcatggctggactatccacagcacggtcgttactgtgtggaagggggtcagatggcttatgagagccaaaccagtttatcctgagaaagacgaattaccctgtggctaaaatacactgtttttactaacctgtgtagcattgtcccctttaataagtttaggtcttctgtccaaactgagaaaaaccatggtcactttggcaaatttccggcagtgtgtgtccctgccgctgcttagcaagggcggcggtgacttggctaatctactcagactcattgcatggctcttgggtatcatggagtattccagcatagagcctgaccagcagtaaatgtctctcctggtacagttactgtctgctggactaagtgcgctgagatggttctcaatggagaatgcttaatttgcttttaacctcttgtttttgtgaggtgggtttagttttaagcttatgtcccataagaactccattcacaggcaagcagctctttccgcacacagcatatgcatcttctgaggtaatggctttataaggaagctgttcataacataagttattattattattgaacacaggtggatgtgaaggattttttttcattgaagaaccaaatggtttttcttttttctgttcagtgagcccacagagaccctggcaggaacagcattgctggcagcattgctgctgggcttttccagtgtagttcttgctcctaggtcacgtgacagcgaacacgatgcctgaggaccgcgcagacaggtttcccaccgcacagccgcccaaggtcccgccatggtccggtagctccttttcttgtcctcccctctgcccatctccacctgcagtactgagtggcgtttcccagtaccctttggggccacctcagggaacgggtttgcctggtattcagccagcggcacccaccctgccccacgaggctccctcagatccgccccacatccgtgtgttgaagaggagaaaggaccagggaaccaaaggagtggactgttgagttttatttatttattttttgtttttttttctcctaagtctgccagtctctgagatcagaacgacagtgtagggtagccgcctaatcatgttgtgattctattggtgggatgaaatgttccgcccccatggaaggagtacactcgtcgtttatgttctgtaatcgcacaatgtactgtaacccaaattccaattccatgtatttttattacagtttctctgggaaaaaaaaatgtgaaacaataaaaaggtgttgattcacgaaaaaaaaaaaaaaaaaaaaaaaaaaaaaaa

SEQ ID NO: 640 - DNA, 485 bp, Rattus norvegicus
  misc_feature (1)..(485): n = a or c or g or t
ctggtcgctgagaatatttattcaaaaacggggattgaaaaaaactgtacagagtgtctgctgctgagaactgggcccctgccccccaggccacaccccctgctataggcagagccctctctttgggttgccccccggacaagcccatccagtctattccagtcaaaagggtatcagtggaagcagcaggatctgcaggggatgaagagaagcttggccccagccacccctcactctcctccaattcccactggggcagcaggaagaagcccaaagggatggagaggacacgagtagcccctcccacggcagggcactggggaggccccagctactccctgcatccaagcataggtctgaaggggtggagcccctgctctggggctgccaaactcctagaaccctgggccaggaactgtcccctctctgaggaggatctccaaagatggggcaaggtanggggtgcatccatgcgtctggcatta

SEQ ID NO: 641 - DNA, 488 bp, Rattus norvegicus
aaagggaggagaactttattgtatgtttcactcaggttttgcgggcggtggtctattttccagggaagactaaacacttttatggagagaggtggttaattccatagtcagtatcagggatgggctgaatttcaagtttccattaaagaaagctgggccttccctctctatgccttctgctgatctggaggataaccctaccctggttctccaaagggcatgttacttctggccgcaggccccaaccttcacagacctcagggtctgcgctccttctccaggccgttctctgaggcctgtctccgcgggggccaggtcaccgccaactttccatctcccctgctcgcggagaacgcaagacgccaagactccaagacaggtcggatagatctggggatcgggtgacgctcggcgctggctcccggtcctcggctgccccgtagatgctgcgccgctgcaactgcagctcccgctcgcgctcaagcacc

SEQ ID NO: 642 - DNA, 1660 bp, Rattus norvegicus
tgctggttctcggctgctccactgagctatggcgttcgtgaccaggcaattcgtgcgctccatgtcctcctcttcctctgcgtcggcggccgccaagaagatcctgatcaagcatgtgacggtcatcggcggcgggctgatgggcgccggcatcgcgcaggtagctgcagcaactggccatacagtagtgttggtggaccaaacagaggacatcctggcaaaatccaagaagggaattgaagagagccttaagagaatggcaaagaagaagttcacagaaaaccctaaggctgccgatgagtttgtggagaaaaccctgagctccctttcaaccagcaccgatgccgcgtccgtggtgcacagcacagacctggtggtggaggccattgtggagaacctgaagttgaagaatgagctattccagaggctggacaagtttgctgcagaacacaccatctttgccagcaacacgtcttctttgcagatcacaaacatagccaatgccaccaccagacaagaccgatttgctggcctccacttttttaaccccgtccccatgatgaagcttgtggaggtcattaaaacaccgatgaccagccagaagacatttgaatctctggttgacttttgtaaaaccttagggaagcatcctgtttcctgcaaggacactcctggatttatcgtgaaccgtctcttggtgccatacctcatagaagctatccggctgcatgagcgaggcgatgcatctaaggaagacatcgacaccgcaatgaagctgggagccgggtatcccatgggtccctttgagcttcttgactatgttggactggatactacaaagttcatcttagacgggtggcacgaaatggatccggagaaccccttatttcagcccagtccttccatgaataatttggtggcccagaagaagctgggcaaaaagaccggagaaggattttacaaatacaagtgatcccccctcggcagcatctccagccagccactggacaaggacaagcacgctctgcactgttgtttccaggcttgccgtgggctgctcagtggacccccccttgcagtctctctgacgtaatctcttggctagttacggtaatggggttcttccactgatatctaattctctagtttagtctgttctctgtgaatttttctgaaaagcagtataccctgggtgccttggagcaaacatctttttctctggaccttgccactttttgtaagaagcaatcattagccgcattcactcaggtctcctgaaaatgagtatgccgtgtttatcagcgttgaaccccaggggcaggcaccatggtgcctacagatgcacctgagaggccttgcgtgcctgggaacatttgtagcccgcagcctcgagccttagcctacattctgggcgtgacagaaaatgtcccgtcttttttactcctcatcaggacaggactcctggagttttgggcaagtacctgtgagcttggttcttggcccatcttcgtggccgttcggatcttaaccgtcactgtctgtctctctcatttcttcaggagaaatcagtgctacaaagtgcctctgagctgactctactaaaatgcagtcttttaatctgtaaacattgggatgggaataaataaacgtatacgacttg

SEQ ID NO: 643 - DNA, 1447 bp, Rattus norvegicus
ggggagcactcgggggtggaggccagaagccggctggactgaaagggacgtctcctctccgaagactcttcaagaaatcacaatgtcaaccaacacagacctttctctctcttcatacgatgaaggtcaggggtccaagtttattcggaaagctagggagacaccgtttgtccccattggaatggccggcttcgcagcgattgttgcatatgggctctacaagctgaagagcaggggaaacacgaagatgtctattcacttgatccacatgcgtgtggcagcccagggctttgttgtgggggccatgactcttggtatgggctattccatgtatcaagaattctgggccaagcgtaagccttagaagagctgctgccttggtctgggaagtgcttgctttagttagacgtctcatattgaggttacatgtttgtgtctgcaataaataacatatggtttagacaaaacacagtattgaatgttggtttactttctggccaacttgatttgcctggtgaccagattgttagtgactgattcactaactaggtcgctaagggggtcagggtaacacagaagaaatctgtcacctgaaagtacttggtcacagtgctttccttacacccttatgatgaaagtcactgtaagaagggctgctggcagtccaggcacaccctgtgtgcagagtcggccatgctttgggagggtgtcaggaaagagtcatttactttgtctgcctgtgggctgacttcagaacttcaggtcttaaggtttgctggcttctgaaaacactttctaaagagcccatgaaatataaatataactaacttagaaagccctgtacctcagtaggagggagcgcgtgtgtgtgtgtgtgcgcgtgtgtgagtgtgtgtaacaacccagaaagctggtaagagctgcagagaggcagtgtttattagattcacacttagacactgattgtgggttctggtttagctcttttataattgtaaagttatatttttgctgctttgtaataggataattcttaagcatcatcttaaaatagaggtattttgtttcttttttgtggtgctgggcattaagtgcagggtctcacataggctaagcaagtgctgtgcactgagttgaaccccagcagaagtaggtgctgcaagtgtaaaacaaggctaaagggcctaatgcacacagcctgtgcaggccgcgtggccaccgtctataaggccatggctattaaagtaccgaaggtgagaggtgaacggtgggcgggctggtttttccaatatttacatacaaatttggatacacagaatattaaatgcactgtaaaatccccctgtccaacctgaacttacattccatccacagtgccaagatggtgtatgtattgttattaaaataagtctgaacataaaaaaaaaaaaaaaaaaaaaaaaaaaaa

SEQ ID NO: 644 - DNA, 484 bp, Rattus norvegicus
  misc_feature (1)..(484): n = a or c or g or t
actgtggctaaacagccacaattagcaactttaatataaagtttttaatacaaagttcaccacaaagaaagcagatgccatgcgtggaggcacgtggactgcagctgcctcatcctcaagtcccgggcttctggtgttttgtcctcggatccagcagttcccatgtggaggctgcatggcctctgtccttaacattgatgccgtgggtcatgaggtcctggcggagtgcgtcacatgcctccagcaagggctgcctctcctggagctgctgtttccgggcctccccggtggccccaggcgtggccagtgcatactggcggaccttaagcctgaagcgcactagttcatctaccacacagtgcanggctactgtgctgctgtctcctgaaacacactgtcgcttggccagagaaatccaacagtctcgaaaaactgctcaacgtaggcaacgatggccccaaacacagtgggacttctcgggcca

SEQ ID NO: 645 - DNA, 381 bp, Rattus norvegicus
agctcaagaattacacactagccaacattagtatatatttacatgctgaaactggctgcaattagttgaaattcatgaaaataattcttatgtgctattcattgataatccttttttgaatttgactaccgcgtgtatcccagagattttagaagtcctgatgttagaaagacgtgaaaacggatgcagtgagtcccgctagtgctttgcatttttctagctgttggggagtgagcaggatgtgtgtgttcagaaaggctacaaggtcattgtaaggctgataatcactacgttgtgaagacacgggaccatcacttcttataaaaggacagttcagaactacgcaggaacaattccataacagaactatttaaacaccat

SEQ ID NO: 646 - DNA, 1065 bp, Rattus norvegicus
ggagacccagtaaagagtccggagtccgtggggatccagcggagaaaggtcacgggacttcttgaaaaggggcccggactcgaacctgggaccttagaacaatggcagcagccagggctagccttggccggatctttccagagtcctccatcctgttcctatgtgacatgcaggagaaacttcgagacagagtcctctacttccctcagatcgtatcaatggccgctcggatgcttaaggtggcccggatattagatgtccccgtcttgctgacagagcattacccacaaggcctgggccccacagttcctgagctgggcgctcagggcgtgagaaccatgagtaaaacgtccttcagcatggtgcccccacttcaacaggaactggacaaactgccccagctgaagtctgtgctactttgtggcattgagacccaagtttgcatcttgaacacagctctagacctcctggaccgagggctacaggtccatgtagcagtggatgcctgctcttctcaaagtgagatgaaccggctggtggcactggcccgaatgcagcacagtggtgtcttcctgtccactagcgaagcgctgactctccaacttataaaggatgctgcccacccacagttcaaggagattcagaagatcctcaaggagccagtcccagaaatcggactgttaggtttcttccaaggcatgaacaaccccctgttgcccaactccaggccctgacttgaaggaagcacccaccctccttgtcacccagacgttgatggatgacttttccttcatccctggatcccaagagtggtgcagtcctccaggagaaccgcccccgtgggagaggaggcgtggttatgtcttccgattgggcagctggccccggaaatgcaaatgaaactccttgaagctgggtgggaattggtttagagaaaggtggaggtggggctgggccccgggccacttcacgaagcgggaaaaggagggggaacgaatgtcacaactgggacccagtctcgaagaataaacattgatgtgactgaaaaaaaaaaaaaaaaaaaaa

SEQ ID NO: 647 - DNA, 598 bp, Rattus norvegicus
cataatactgtcattacaaaaaaatacaaaaaactactataaaaacattcaggggcttgtcaaagtgagaaaacctaaagaccccaccccaggaccaactgaagcagttttctcccagctccttcactattcgacttttatacaactgtgggagtggggtggggtgagggtcacacaggcagagaggctggaaatttccgacacagcctccaagaaaagtaagaaataagtagcttcacatatcgcaaaagtggggcttggaagtttggggtggctaggccctgagttcagagatatgggaaggaacctgtgatcctgaatctcttggtggggaacagctgccacctgatcccaaagcccttttccttcctggtgatggctgggagatgggtcctgccccacctcttagctgtggtggatggttcaagccctcctttcttctctccacccctgaacactccccagagcagctgagggggacagatcctccaactctgtggggtgtaggcaaggcagctgttgggaaggctcctaagggttggctcaactccctgccccaaatgaaaagtgtctcgtgctcaaatgacagccttgttca

SEQ ID NO: 648 - DNA, 1870 bp, Rattus norvegicus
gtccctgcgagtatcgaggctatcgcagtttcttacccgggctatctgtcgccatccgggcccgcggaggccgttgcaggttttagaagatggcgaagtttatgacacctgtgatccaggacaacccctcaggctggggtccctgtgccgttcctgagcagtttcgggatatgccctaccagccattcagcaaaggagatcggctggggaaggttgcagactggacaggggccacgtaccaggacaagaggtacacaaacaagtattcctctcagttcggtgggggaagtcagtatgcatatttccacgaggaggatgagacgagcttccagctagtggacacagcgcgtacacagaagacggcctaccagcggaaccggatgagattcgcacagcggaacctccgcagagacaaagaccggcggaacatggtgcagttcaacctacagacactgcccaaaagtgccaagcagaaagagagagaacgaattcgcttacagaaaaaattccagaagcaatttggagtgaggcaaaaatgggaccagaagtcacagaaaccccgagactcctcggttgaagttcgcagtgactgggaggtgaaggaggagatggacttccctcagctgatgaagatgcgctacttggaggtgtcagagcctcaagacatcgagtgctgtggagcactggagtactatgacaaagccttcgaccgcatcaccacgaggagtgagaagcctctgcggagcatcaagcgcatcttccacactgtcaccaccacagacgaccctgtcatccggaagctggcaaaaacgcagggcaatgtgtttgccacagatgccatcctggccacactgatgagctgcacccgctccgtgtactcctgggacattgttgtccagagggtcggatctaaactcttctttgacaagagggacaattctgactttgacctcctgactgtgagtgagacggctaacgagccccctcaagatgaaggcaattccttcaactcaccccggaacctggccatggaggccacctacatcaaccacaacttctcccagcagtgcctgagaatggggagagagagatacaatttccccaacccaaacccatttgtggaggatgacatggataagaatgagatcgcctccgtggcttaccgttaccggaggtggaagcttggagatgacattgaccttattgttcgctgtgaacatgatggcgtcatgactggggccaacggggaagtgtccttcatcaacatcaagacactcaatgaatgggactccaggcattgtaatggcgttgactggcgtcagaagctggactctcagcgtggggctgtcatcgccactgagttgaagaacaacagctacaagttggcgcgatggacgtgctgtgctttgctggctggctctgagtacttgaagctcgggtatgtgtcccggtaccatgtaaaggactcctcgcgccacgtcatcctgggcacccagcagtttaagcccaatgagtttgccagccaaatcaacctgagtgtggagaatgcctggggcatcctgcgctgtgtcattgatatctgcatgaagctggaggagggcaaatacctcatcctcaaggaccccaacaagcaggtcatccgagtctacagcttgcctgatggcaccttcagctctgaggaggacgaagaggatgaggaggaagaggaggaagaagaagaagaggaagaaacttaagtgagttggcctggtgcctgcgtgtgttagcacctagctgtgcctgggcagcgtgtgtccagctcctgttctctagcagaagaaataaaatttaagtccttttggtttcaaaaaaaaaaaaaaaaaaaaaaaaa

SEQ ID NO: 649 - DNA, 369 bp, Rattus norvegicus
cgtgaaaggcaatttattcaaggagcaccataactgagagggaaaaagaaagacaccatggctgtggaccacagggaagctctcgatgcacaagatggcctttgccaaacggggcttggcaatgagtaccggtgaaacatggagtcataaagtagcatctggaccctcagggcttggggaaatttcctttgcaccacagtgcgagcacgttctcagagtgtgctgtgcagtatgaaatgatcctcagccgtctttacactgatggccctcctccaattcaggagcaagtcagagcataaatattgtatgtttcacatcagaagtggagcctcttcccagctgcagggccaagtctatttctgctacaca

SEQ ID NO: 650 - DNA, 2105 bp, Rattus norvegicus
gtggtgtttgaccccttcggcggtgtgtgaaaagaaaaggaaggagccggagcttcctaggagcggtcgccgaaatgttccggtgtggaggcctggcgggtgctttcaagcagaaactggtgcccttggtgcggtcggtgtgcgtccagaggccgaaacagaggaaccggcttccaggcaacttgttccagcaatggcgtgttcctctagaactccagatggcaagacaaatggctagctctggtccatcagggggcaaaatggataattctgtgttagtccttattgtgggcttatcaacaataggagctggtgcatatgcctacaagactattaaagaagaccaaaaaagatataatgaaagaataatgggattaggactgtcaccagaagagaaacagagaagagccattgcctctgctgcagaaggaggctcagttcctccaatcagggtaccaagtcacgtccctttcctgctgattggtggaggtactgctgcctttgcagcagctagatccatccgggctcgggatcctggggccagggtcctcatcgtatctgaagaccctgaactaccatacatgcgacctcctctttcaaaagaattgtggttttcagatgacccaaatgtcacaaagacactgcagttcagacagtggaatggaaaagagagaagcatctatttccagccaccttctttctatgtctctgctcaggacctgcctcatattgagaatggtggtgtggctgtcctcaccgggaagaaggtagtccacctggatgtaagaggcaacatggtgaaacttaatgatggctctcagattacctttgaaaagtgcttgattgcaacgggaggcactccaagaagtctgtctgctatcgatagggctggagcagaggtgaagagtagaacaacacttttcagaaagattggagattttagagccttggagaagatctcccgggaagtcaagtcaattacagttattggtggaggcttccttgggagcgaactggcctgtgctcttggcagaaagtctcaagcctcaggcatagaagtgattcagctcttccctgagaaaggaaatatggggaagatccttcctgaatacctcagcaactggaccatggaaaaagtcaaacgagagggagtgaaagtgatgcccaatgcaattgtacaatcagttggagtcagcggtggcaagttactcattaagctaaaggacggaaggaaggtagaaactgaccacatagtaacagctgtgggcctagaacccaatgtcgagttggccaagactggtgggctggaaatagattccgattttggtggcttccgggtaaatgcagagcttcaagcacgttctaacatctgggtggcaggagatgctgcatgcttctatgatataaagttgggtcgaaggagagtagaacatcatgatcacgctgttgtgagtggaagactggctggagaaaatatgactggagctgctaagccatactggcatcagtcaatgttctggagtgatttgggtcctgatgttggctatgaagctattggtctggtggatagtagtttgcccacagttggtgtttttgcaaaagcaactgcacaagacaacccaaaatctgccacagagcagtcaggaactggtatccgttcggagagtgagacagagtctgaagcttctgaaatcacaatccctcccagtgaccctgcagtcccacaggtccctgttgaaggggaggactacggcaaaggtgtcatcttctacctcagggacaaagttgtggtggggattgtgctatggaacgtctttaaccgaatgccgattgcaaggaagatcattaaagacggtgagcaacatgaagacctcaatgaagtagccaaactcttcaacattcatgaagattgaatccctatcatggaatacacaagcacttttccatccctgacagggaatgggtggataaaagaacattttttattcagcatactttttctttatgtaggagcaggaatcgaacaagcctctgtgaatattttcatctgtataaatgcacatcacaaattaaaatctgattcttttcaaaaaaaaagcggccgc

SEQ ID NO: 651 - DNA, 395 bp, Rattus norvegicus
caaaagttgatagaaaacagttacagtttttttaattaaatgcaatacacagcacaagaaaaaaaatagccaactttttactagacatttcttatcttccacaatattcagtagctttttaataccacgtcaaatacatcctatttaaatattttgattatttgtagacagtcttccagcaacataattaatttcttcccttcatcaaaactctgcaataaattattctttcaactgaagattttaccctagcatgacaaagtttaaaatatgaaaacaaatgcctctctttttttgaataatgcatattagaaagccatataacattcttcaatattacagtaataattgcacaaaagaaggctagatttttcttctcctatctttcccagact

SEQ ID NO: 652 - DNA, 4743 bp, Rattus norvegicus
  misc_feature (1)..(4743): n = a or c or g or t
cacgcgtccggaggcggcggtggcggctgctgaggctccgctgtggggatattggcggcagcagctgcgggctgagctgcgctgtgcagacccggtgcacggtgcgggatccgggacggcgcgtcccctagaagatgcccctgatggaacgggctctgggaagcttctctggccccgtggctttgaacaggagctcaagccggaggccatttaaagccctggctgttgtatcctgaggaccacaggtcaggagaagatgtctgtaattttagacgacgacgtgctgctcatcctgaccttggacgaggagctgagtgcgccgctgactccttccaacggcctgggccaagaagacctgcccagcaaaaatgggggcggccaaagcggccccaactcccaagttcccagtctggtctctggagccgacagtcccccctccagtccccccggacacaactgggagatgaattatcaagaggcagcaatctacctccaggaaggccagaacaatgacaagttcttcacccaccccaaggatgccagagcgctggctgcctacctcttcgtacacaaccacttcttttatatgatggagctgctcacagccctgcttctgctgctgctgtcactgtgcgagtcacccgctgtccctgcgctcaagctccgaacttacgtccacgccaccctggagctgttcgccctcatggtggtggtatttgaactctgcatgaaattgcggtggctgggcttccacacattcgtcaggcacaaacgcaccatggtcaagacgtctgttttggtggtgcagttcatcgaggccattgtggtgctggtgcggcagacgtcccacgtgcgggtgacccgggcactacgctgcattttcctggtggactgtcggtactgtggtggcgtgcggcgcaacctgcggcagatcttccagtcgctgccgcctttcatggacatcctcctgctgctgctcttctttatgatcatcttcgccatcctcggtttctacttattctctacgaacccttccgacccttacttcaacaccctggagaacagcatcgtcaacctgtttgttctcctgaccacagccaactttccagacgtcatgatgccctcctactcccggaacccctggtcctgtgtcttctttatcgtgtacctctccattgagctgtacttcatcatgaacctgctcctagccgtggtgttcgacaccttcaacgacatcgaaaagcacaagttcaagtccttgctgctgcataagcgaacagccatccagcacgcataccacctgctcgtcagccaacggaggccggccggcatctcctacaggcagtttgaaggcttgatgcgcttctacaagccccggatgagcgctagggagcgcttcctgactttcaaggccctgaatcagagcaacacacctctgcttagcctgaaggacttctatgatatttatgaagttgctgctctgcagtggaaggcaaagaagaacagacagcactggtttgacgagcttccccggacagccttcctcatcttcaaagggattaacatccttgtgaattccaaggccttccagtatttcatgtacctggtggtggctgtcaacggtgtctggatcctagtggagacattcatgttgaaaggtgggaatttcatctcaaagcacgtgccctggagttacctcgtgtttcttaccatctatggagttgagctgttcatgaaggtggctggcctgggccctgtggagtacttgtcctctggatggaacctgttcgatttctcactcacagcatttgccttcctgggactgctcgcgctgacgctcaacatggagcccttctactttattgtggtcctgcgtccccttcagctgctgaggttattcaagctgaagaaacgctaccgcaatgtgttggacaccatgtttgagctgctgccacgaatggccagcctcggcctcacactgctcaccttctactactccttcgccatcgtgggcatggagttcttcagcgggcgactgtcccccaactgctcaactccagcacgttggggcctgacgcctatcgattcatcaatcacacggttgggcaataagaccaagtttggaagaaaaggctactactatctcaataactttgacaacatcctcaacagctttgtgaccttgtttgagctcaccgttgtcaacaactggtacatcatcatggaaggcgtcacctcgcagacttcccactggagccgcctgtacttcatgaccttttacatcgtgaccatggtggtgatgaccattatcgtggccttcatcctggaggccttcgtcttccgcatgaactacagccgcaagagccaggaatcggaagtggacagtggcatcgtcatcgagaaggagatgtccaaggaggagcttctggccatcctggagcttcatcgagaggcgcgaggcacctcctctgacatcacccggctgctcgacaccctctctcagatggagaaataccagcaaaactccatggtgtttctgggacggcaatcgagaaccaaaagtgacctgagcctgaagatgtaccaggaggagatccaggagtggtacgaggaacatgcccgggaacaggagcagcagcagctcaggggcagcgcgccaagccctgcagcccagcagacccccggcagtcgccagcgctcccagaccgtcacctagcccggctccgtcaagccagcctcttctatgcaataacaccatagtattatgtactacgatgtatggaaaccatgtgtgtatgtagacacactcatatatatgcacatatttacacagagagagaaaaggactagccagggtccgtccgaaccacctcgctctgtcttcctgagctccagaaattggtttaggctggaggctcagacctggcctgagctcttcctaccatggaaaattctggaagccctcctgctcaagaaggctgcttaaataggctgtctcatcttagcaatgccagcattccctgggggaccttgctgtagcctcgggcttcgtccctgcattgttgtctacttgtcctccagccatcacaggtgtctgtgtctggtattagggacaaaaccactaggaagaaaccccacatcccgctgaatggcgtctgtagatgacaaagtgctagaaggtcccgttgagggaatcagtgcctgggacccagtgagaaaccggacagaggccagagatggctcagagacagcagagtgtactcgctcaggcttctagtcctttcttgttgctgaaacccttccacagcctcgtagggaagctcacccagcaggagaaagccaactggagaccctgggaatttgactcattcaggaggagttcatttgaactggtgctgaaggcaggtccctcacccccacacctccactcttgcagtagacactgtgtttgggangggagccacacatagcacagggacactaactgcccatcatagcagtccctggctggccaccacgccacggctagctgcttttcaaggactctgaggcacagtgagtactggcgtcctccaaggttctcataagctaggtgggtaggggaggaaggtgaggtgagcactcagcagccttgtaccgtgccttgtgggggttcttttgatgtcacggttgggtagtgaagtggcagaggcaggcgtagcaggggtggagccctggtcacttcatcctgctgtgttgtccacaaggggtgggaaggaggcagggctgtctgaagttgccaggcagccctgtgaacctgcccttccgaacctactgctgcctgggaattggagtgggcaggcaggcacaggtcccctcccgttctcccagctgctgaaccaggggccaagccagaaagtgggtgtttttactctaaataaagcacagtctgccccacaccgcacccccaggaaaaccactggtttccacagagagtcaggagactggcaaagtcccttccacctcaaagagctcttggcctctacctaaactcaacctagactctaggccacagacctgagaagcaacttcatctagctggctgccttagcttgtgtatgagtggcattttggaagcagaaaggggggaggcctatgaagagagcctagggcctctgattaacccgcctggttctaggctaccccaggtacccttggtctaggggagcaggctcaggcagagggactggtcttgggccctgatagaggtactaaaacccccaggttcagcacataccagccaggtgcctgagggagtttgggctgtcaggccaaactgagcttgtcctgtagcctgagaaaacctgtccccacagaagtcaccttgagcacacaccaagctgaccctcaaacttgctagcccagcagggaacagatgggtcacccagggatgtaagctgaggcccctgggatcctgtctaagccagcttccccttccctcagttcagctgagtgggaactggtggctccctgtcatagcctagcaggggcagctatggaaccagactggggataggcactcttgtgggaactgtgcccgacccctcccccttgctcctcctcccccacctcagccttacaccgtgcagacaatcattttgtatgtgttaagagccacgatggaaggttttatacagtaatttgttacctaggaacccactgtgccctgatttttgtcgtgccaataaagagcccctgctttat

SEQ ID NO: 653 - DNA, 327 bp, Rattus norvegicus
gccagagcagagactcaagccaggtttaatggtcattgtctagttccagagcccgtgggctccgaggtttgccagcctggtgtacacagtgggaggaagagtcctagacacagaaagagagaattacaaggcaaagacacatacacacccggaaatcggctttgttctccccagacaggtctacccttcctggcctcctccaggggccccatagatacagcaaagaaaaagatcacagataattacacagactgtagagtcctgtcacatcctgtctccagaggaacctgcttctccttcctgggagatagtttatgagtatagatg

SEQ ID NO: 654 - DNA, 777 bp, Rattus norvegicus
atgcaccggcgcggggtgggagctggcgccattgccaagaagaaactcgccgaggccaagtataaggagcgagggactgtcttggctgaggaccagctggctcagatgtcaaaacagttggacatgttcaagaccaacctagaagaatttgccagcaagcacaagcaagagatccggaagaatcctgagttccgagttcagttccaggacatgtgtgctaccattggggtggatcctctggcctctggaaaaggattttggtctgagatgctgggtgttggggacttctattatgaactgggcgtccagattattgaagtgtgcctggccctaaaacatcggaacggaggtctgataactctggaggagctacatcagcaggtgttaaaaggaaggggcaagtttgctcaggatgtcagccaagacgacctgatcagggccatcaagaagctgaaagcactgggcactggatttggcatcatccctgtgggaggaacttacctcattcagtctgttccagctgagctcaatatggatcacactgttgtgctgcagctggccgagaaaaacggttatgtgactgtcagtgaaatcaaagccagtcttaaatgggagacggagcgagcacggcaagtgctggaacacctgctgaaggaaggactggcctggctggatctgcaggcaccaggggaggcccactactggctgccagctctcttcacagatctctactcccaggagatatcagctgaggaggccaaagaagtctttccttga

SEQ ID NO: 655 - DNA, 653 bp, Rattus norvegicus
aggcggctgccgaagatggcggaggggcaggttctagtattggatggccggagccatcttctgggccgcctggcggccattgtggccaagcaggtactgctgggccgaaaggtggtggttgtacgctgtgagggcatcaacatttctggaaatttctacagaaacaagttaaagtatctggcctttctccgaaagcggatgaacaccaacccgtctcgaggcccctaccacttccgagccccaagccgcattttttggcgcactgtgcgaggcatgctgccgcacaagaccaaaagaggccaggctgccctggaacgcctcaaggtgttggatgggatccctccaccctatgacaagaaaaagcggatggtggtccctgctgccctcaaggttgtgcggctgaagcctaccagaaagtttgcttacctggggcgtctggctcatgaggtcgggtggaagtaccaggcagtgacagctactctggaggagaaacggaaggaaaaggcaaagatccattaccggaagaagaagcagctcttgaggctaaggaaacaggcagaaaagaatgtggagaagaaaatctgcaagttcacagaggtcctcaagaccaatggactcttggtgtgaacccaataaagactgtttgtgcctca

SEQ ID NO: 656 - DNA, 371 bp, Rattus norvegicus
aggatcatccaagaataatatgtttacaactttaatggccttgattgtgttaatagagctattattcataaggaaaatgaaaactactccatgttggaggagtgctttggaatgagccctatggcgagctatacaaagtataagaggagaatcaagaccagcgcacaactgttcggcgggatggatggagacgagctggtttgactcttcagcatgcataccaccctggaccaggacccattgttgggcagtggggtgatgcctacgacattacacatgatgttgtagacatccacagatctgattggagcagctctgaagttcgacttgaaatcaggtccgaaggccaggaagatccctctcatgtccat

SEQ ID NO: 657 - DNA, 1175 bp, Rattus norvegicus
gtgtccgcaggcgaccgagcgctgaactgaggaaaggtactgttgtcgccgagagaatcccgacccggctgcacgcgcgtggccatgtggaggctactgacgcgcgcgcccgcgccgctctggcggatgcacttttcagatacttgggcagcccttcccaccagtgctggtctgaagacgctcctcccagttccaacttttgaaaatgtctccatccctgaaagatccaaacttaaatttgttgaaagagtcccacttgtgccaaaagtaaggagagaacctaaaaatctgaaggacatacgagggccttcagctgaagccactgacttcacagaaggcaattttgcaattttggcacttggaggtggttatcttcactggggccattttgaaatgatgcgcttgacaatcaatcgatttatggatcccaagaacatgtttgccatatggcgagtgccagcccctttcaagcccatcactcgaaaaggtgttgggcagcgcatggggggaggtaaaggtgccattgatcactatgtgacacctgtgaagactggatgcctcatagtagagatgggtggacgctgtgaatttgaagaggtaaagcgtgtcctgaaccaggttgcccacaagttgccctttccagcaaaggccgtgagccgtaagactctagaaaagatgcaccaaaatcaaaaagaaagagaacttaataaccagaatccctggacctttgagcgcatagccactgcgaacatgtttggcatacggaaattcctgagcccatatgacctgactcagaaagggcgatattggggcaaattctacatgcccaagcgcgtgtagtgaaaacacaggaacatggctcagactcattgagaatctgcacccttactgtccttagggtctttggtggttcttggatcttaactaagcacatgagtaagtgacttctgaaacactgtgtcacccgattggctctaattaaagttcgagtgtaatctcagggtacaacttctctttggtcagtgtcagttgcttaaaggattaaggacagttcgacatagccagctgtcccagcactcaggaggcagagacgggtgggtctcgtttgagttcaaggccactcacatctacaagcaagatcttgtctccaaaaaaaaaaaaaaaaaaaaaaaaaa

SEQ ID NO: 658 - DNA, 4550 bp, Rattus norvegicus
cggcggcggcggctaagagggcccggcttgtgggagccaaggtgggagcgggcctcggcgcgcggccaccatgtccgcgccgtcggaggaggaggagtatgcgcgtctggtgatggaggcgcagccggagtggctgcgcgccgaggtgaagcgactgtcccacgagctggccgaaaccacgcgtgagaagatccaggcggccgagtatggactggcggtgcttgaggagaagcaccagctcaagctgcagttcgaggagctcgaggtggactatgaggccatccgcagcgagatggagcagctcaaagaggcatttggccaggcacacacaaaccacaagaaggtggctgctgatggagagagccgggaggagagcctgatccaggagtccgcctctaaggagcagtactatgtgcggaaggtgctggagctgcagacagagctgaaacagctgcgcaatgtccttatcaacactcagtctgagaatgagcgcctcacgtctgtggcccaggagctgaaagagatcaaccagaatgtggagattcagcgtggtcgcctgcgagatgacatcaaggagtacaagttccgggaggcccgtctacttcaggactactctgagctggaggaggagaacattagcctgcagaaacaagtgtctgtgctcaggcagaaccaggtggaatttgagggcctcaagcatgaaatcaagcgtctggaggaggagacagagtaccttaacagccagctggaggatgccatccggcttaaggagatctctgaacggcagttggaggaagcgctggagacgttgaagacagagcgagagcagaagaacaacctacgtaaggagttgtcgcactacatgagcatcaacgattccttctataccagccacctgcaggtatccttagatggcctcaagttcagtgatgatgctgtcactgctgagcccaacaacgacgccgaagccctggtcaatggctttgagcacagcggcttggtcaaagcgtcgttggacaacaagacatccacacccagaaaggatggcctggctccgccctcccccagccttgtttccgacctgctcagtgagctccacatatctgagatccagaagctgaagcagcagctggtgcagatggagcgggagaaggtgggtctgctggcgacattacaggacacacagaagcagctagagcaggctcggggaaccctctctgagcaacatgagaaggtgagtcgtctcacagagaaccttagtgccctccggcgcctgcaggctggcaaggagcgacagacttccctggataacgagaaggaccgagatagccatgaagacggtgactactatgaggttgacatcaatgggcctgagatcctgtcctgcaagtaccatgtagctgtggccgaggctggcgagctccgggagcagctcaaggccctgcacagcacacatgaagctcgggaagcccagcttgcagaagaaaagggccgctatgaggctgaggtccaggctctcactgagaaggtgtcactgctggagaaggctagccaccaggaccaagagctgctggcccagctggaaaaggagctgaggaaggtgagtgacgtggctggtgagacccagggcagcctgaatgtggctcaggatgagttggtgaccttcagcgaggagctggccaatctctaccaccatgtgtgcatgtgcaacaacgagacacccaaccgtgtcatgctggactattaccgtgaggggcagggcaaggctggccgcaccagcccagaaggccgcgggcgccgctcgcctgtccttttgcccaaggggctgttgtcgacagagatcggccgagcagatggtgggactggggacaacagcccttcacccagctcttcactgccatcaccattgagtgacccccgccgggaacctatgaacatctacaacctgatcgccatcatccgagaccagatcaagcacctgcaggcagccgtagatcgtacaaccgagctgtcccggcagcggattgcctcacaggagctgggccctgctgtggataaggacaaggaagcactcatggaggagatcctcaagctgaagtcactgctgagtaccaagagggaacagatcaccacacttcgtactgtgctcaaggctaacaagcagacggcagaggtggccctcgccaacctgaagagcaagtatgagaatgagaaggccatggtgaccgagaccatgatgaagctgcggaacgagctgaaggccctcaaggaggacgcagccaccttctcctccctgcgtgccatgttcgccaccaggtgtgatgagtacatcacgcagctggatgagatgcagcggcagctggcggctgccgaggatgagaagaagactcttaattccctgctgcgcatggccatccagcagaagctggcactcacccagcggctggagctgctggagctggaccatgagcagacccgcaggggccgtaacaaggccacctccaaggccaagccagccacaccgagcctgtagagtagctgcccggaggacgtggccaccaggccctgtcacactgcagcccctccccctcccctcctgtggcccatgcagaggaaggaagggcagcctaaagtccacttagaaatgtttggatatgccactgtaattctttcaaaatagcatcccccaagtttttaatgggaggaaaaaaaaagctttactcttgagaatgctgcaagctgctgcttggaaaggtctctggccgaagaacctgcttccttccttccgcagccttggccaggctctaggagctggaatgcctgctgggggtccttattacacatgctccttttaatccgatcaacctgtgcacttttgatattttgatattatatttgcttccttaattccttgcatagagacggtctccagtgccgtggtctgtgcgcgtggtcctgtagctgtccgtcctagctctggtgtgttgacctgcgtcagcacaaggtagagctgagctccatggtgtgtagctagactgcgggtgaggctccgacccggcaaggagccggctagtgtgtccacgctgtggttcagcagcctttagaggacagggcattgtggttcatgtttgaaattacagattttaaatgccatgttcattaagaaatccagggtattccaattctggggttttttcatattgtattattattattattattcttaggaatagttcaatgtaacaagaagaaaacttgacctttgctctggttaaaacagtaataggcacttgaaagcataaattattgaatgagtagtattacctacaaattccagagttttctgggttttaggacattgtgaagcatgactgactaacagaattttatacaactgcaccagtgaaattccaaattggaattgttttgttattctggttgtcgtgccaaattgtggtacacttagaaaattctacagccgtcgatttttaggtgttctatttcaacacctttttgttagtaaccattgccagtagtgccttcatcagttcagggaggtgtcccagccaagtaaggtctctaggatgggcagcggagagctagttgggaatgctgaaggccagtgtggaccaggaggtacctgcctcacttcgtacttgggcatcttcattgagggagcgagaacagtgattgtgcaagattctgttagtcagtgatacttcacatgcaaattcaggggcttagaaacaaaaacaaacacaaacctggactgtgctttgggaaccaaatggacttcctgggacaggctaagcaagctatacagacatggcgtttgtgaagagctgagggcgtcaggagagccggcacagtcggcatgtgagtaggggaagagggttagccatagtattctttgcaaatgtgaaagtcagacattatatcttctcttgcttggtgtaactaatcactgttaatttcaggaaacagaagtcagtaaaactccttagtaagcccttgctaagtgaggttcagggtgtggtcaaattggtactagtggaggaaaagaagttgtcctccggcctaaaaagggacaaattacaataatataaattgttagaaattgaagaattctgtttcctggaatgagcatttcttattcctacttgttgggactctttgccttctgttacagtgttgattcacataaaacattgttacatttaagataacatcatctgtacggggtatttatttgcaacgatgtctaagtactgtattttttctgtgtgttaccttagtgtcagaatgttggtctttattttaaaagtcatatgcatgttctcctgccaaggtacctttacacagacccgaaacagtaacgaacagatgccttcggtttctgagacaatgaggccaagtgaggagaaggcataggaaggtgagactaaccgagacttaggtggcggttgatggcggaccgtctccacagccagcacacataggaaaagtgggcctgggtaaagagtcacattggtaggaccaataaagaataa

SEQ ID NO: 659 - DNA, 418 bp, Rattus norvegicus
ggggaaactgggcagtttattgacaggcatcaggagactgcgcagtcaggtccgtgggcgggacagcacccgagtccaggctctgtgcttctcctcgggccttgtgggcgcaaacttctcctgcagtttcctccacacactcttattcatctcttgaaactcctccaaagtgtctgtggacaggatcagcttgtactcttccacggacaggccactgaagctggtgtctctggggcagggtacttgtgcttgtagtagtttgaatgcagtcgtgctaagctctcgtacatctgatcacaggcctcgggttctgcaacctgggtgttctctccctcccgaaaggcctgtgctacccgctgccgcaggtaagcgcccaagtcccggccccgtttggtctcgtccactggcccctcgtgcc

SEQ ID NO: 660 - DNA, 558 bp, Rattus norvegicus
aaatggttcagaatcactgtgaggcttttagatgttcccattattcaaacaacccaaattaaaaacatacaactcacattttaagtaatataagcaaaataaaaattatctttaacaatgccttatattttgttttagtattctactatagacacataagaataattatttccattttctgcttccctcaaaactataaaatgctgttacatatttttgaaaaatcaaactccttcatatcctttcatcaattttatgttgaaaagagagttattttgaagcactggaattagtgttggaaaaataggtttagagtccaaagctggtgtgtttgcgaataagaacacaagctgacaagtgatttaaattccttagaaaccttcacagttctccatatgtacatgtggcagaaggatgaattgccagccaatatacatcagtgatcagttgcttacatttcaaagatcaaaacacttggtgggaagcctagaaggaaacacttaaagacatataattaagaactcttatctctgaaaagcaaagtccacattttagtta

SEQ ID NO: 661 - DNA, 608 bp, Rattus norvegicus
cactttccaaggttttgctttgtttgacagcagttatgggttgagggggcacacaggcctgacccccatgttccgtttgaccatgtgaggagacccacggcagtgctggtggtcctgggggaccagccagaagagctcagccggaaccactggcttcgaggctttgtgttcatttcgccttcggccccttctcgataggcttcccgatgtccttcccccggagcttgaggccgatggctctctcaattttgcccaaaacctggttattcggaatggcccgtccactttcatagtctgcgatgacttgcggcttttcattgattttcgtggccaggtccttctgcgtcaggcctttgctctgccggccccgctggatcactttgcccacctccagggtcatcctgtcgtggtgcagctcctctgtctcccggtctagcttggctgtgtttttagtgatggaatgctgcttgttctggccagcagcccattttttggatgtctccacatcttctcctcgtcgctgagctgctaagatggcctgcttagacttggcctgtgcggccgtggggcccttcttgcgcagcaccgtcacggtgtcccagtcactc

SEQ ID NO: 662 - DNA, 15438 bp, Rattus norvegicus
aggagccagcgggtagtgctgaacaagactcctgttccggagcggagtaacctgcctgtgcccgctgcgacgcgcgcccacctcccggggaaggaacggcgaggcccggggccgtctccgcgatggagcgcggggccgcagcggcggcgtggatgctgttgctggcgatcgctgcctgcctggagccagtcagtagccaagaatgcggcagtgggaattttcgctgtgacaatggatactgtatccctgcgtcctggaggtgtgatgggaccagagactgtttggatgacacagatgaaattggctgtcctcccaggtcctgcgaatcaggccttttcctgtgtcctgctgaggggacctgcatccctagctcctgggtgtgtgacgaggataaggattgttcggacggtgcagacgaacagcaaaattgtgctgggaccacgtgctcggctcagcagatgacgtgctccaacggtcagtgtattccgagcgaatacaggtgcgaccatgtcagcgactgccccgacggctctgacgagagaaactgccattatccaacatgtgatcaacttacttgtgccaatggagcctgctataacacgagtcagaggtgtgaccaaaaagttgactgcagggattcctcggacgaagctaactgcactaccctgtgttcgcaaaaagaatttgaatgtggcagtggagagtgtatccttcgcgcctacgtctgtgaccatgacaatgactgcgaagataacagcgatgagcgcaattgcaactatgacacctgcggaggtcaccagttcacttgctccaatggccagtgcatcaaccagaactgggtttgtgatggagatgacgactgccaagattctggtgatgaagatggatgtgaaagtaaccagagtcatcataggtgttacccaagagaatgggcgtgtcctgggtctggacgatgcatctcaattgataaagtttgcgatggagttcctgactgtccagaaggagacgatgagaacaacgtcacaagcggaagaacctgtggtatgggtgtctgctctgtcttaaactgtgagtaccagtgccatcagacgccatttggaggagaatgcttctgccccccaggtcatattatcaacagcaatgacagccgtacttgcattgatttcgacgactgccagatatggggaatttgtgaccagaagtgtgaaaaccgacagggccgtcatcagtgcctctgtgaagaagggtatatcctggagcgagggcagcattgcaaatccagtgactccttcagtgcagcctctgttatcttctccaatggtcgggatttgctagttggagatcttcatggaagaaacttccggattctagcagagtctaagaaccgaggaatggttatgggagtggattttcactatcagaaacacagagttttttggacagaccccatgcaggaaaaggtgttttccactgacatcaatggcttaaatacccaagaaattcttaatgtttctgttgacactccagagaatctggctgtggattggattaataataaactttatctggtagagacaaaggtcaaccgcattgacgtggtcaacttggagggaaatcagcgtgttactctcataactgaaaacttagggcatcctagaggaattgcccttgatccaactgtgggctatttgtttttctcagattggggaagcctctctgggcaacccaaggtggagagagccttcatggatggtagcaatcggaaagacctggtaacaaccaaagtggggtggcctgctgggatcactctggatctggtgtccaagcgagtttactgggtggattctcgttatgactacattgaaactgtaacatatgacggaattcaaaggaagacggtagctcgtggaggctcccttgttccgcatccctttggaataagcttatttgaggaacacgtgttctttactgattggacaaagatggctgtgatgaaagccagcaagttcacagaaaccaaccctcaagtgtaccaccagtcttccctgaggcctcacggagtgacggtttaccatgccctcaggcaacccaatgccaccaatccgtgcgggagcaacaatgggggctgtgcgcaggtctgtgtcctcagtcacaggacggataatggtggcctgggctaccggtgcaagtgtgaattcggctttgaactggatgatgatgagcaccgctgtgttgccgttaagaacttcctgctcttctcatcgaaaacggctgtgcgtggaatcccattcaccctctccacccaggaagatgtcatggttcctgtcacagggagtccatccttcttcgttggaattgattttgatgcccaacacagtactgtcttctattcagatttgtcaaaagacataatttataaacaaaaaattgatggcacaggaaaagaggttatcacagcaaaccggttggaaagtgttgagtgtttgacttttgactggatctcaaggaatctttactggacagatggaggactaaagagtgtcactgtcctgaggctggctgataagtcccgacgacagataatcagcaacttaaacaaccctcgttccattgtggtgcatccgaccgctgggtatatgttcctgagtgattggttccgtcctgcaaaaattatgagagcatggagcgatggttctcacctaatgcccatagtcaatactagtctggggtggcccaatggcttggccatcgattggagtgcttcacgattgtactgggtagatgccttttttgataagattgaacacagcacccttgatggtttagatagaaaaaggctgggccatgtagaccagatgactcatccatttggactcaccgtttttaaagataatgtgttcataacagactggagactgggtgctattattcgagtgaggaaatcagatggtggtgatatgacagttattcgaagaggcatcagcagcgtaatgcacgtgaaagcctacgatgctgacctccagactgggtctaactactgcagtcagaccacccacgccaacggtgactgcagccacttctgcttcccggtcccgaacttccagcgggtgtgcggctgtccctatggaatgaagcttcagagggatcaaatgacttgtgagggagacccagcccgagagccacccacacagcagtgtggctccctctcctttccctgcaacaatggcaagtgtgtgcccagtttcttccgctgtgatggagtggacgattgccatgacaacagtgatgagcatcagtgcggggtgtttaataatacttgctcaccttcggctttcgcctgcgtccgcggtggacagtgcatccctggccagtggcactgtgacagacagaatgactgtttagacggcagtgatgagcaaaactgccccacacatgccacgtcgtccacttgcccgtccacctccttcacctgcgacaatcacgtgtgcatcccaaaagactgggtctgtgacacagacaatgattgctcggatggctcggatgaaaagaactgccaagcttcagggacctgccagcctacacagtttcggtgccctgaccaccgatgcatcagcccgctgtatgtctgtgatggggacaaggactgcgcggatgggtctgatgaggcgggctgtgtgttaaactgtacgagtgcccagttcaaatgtgccgatgggagttcttgcattaacagcaggtaccgctgcgatggggtttacgactgcagggacaactctgacgaggcaggctgccccaccaggcctcccggcatgtgccacccggatgagttccagtgccaaggagacggtacatgcatccctaacacctgggagtgtgacgggcatccagactgtatccacgggtccgacgagcacactggctgtgttcctaagacctgctcgccgactcatttcctctgtgacaatggaaactgcatctacaaagcgtggatctgtgatggggacaatgattgtagggatatgagtgatgagaaggactgtcctacccagccttttcactgtcctagcacgcagtggcagtgcccgggctacagcacctgtatcaatctgagtgccctgtgtgacggcgtctttgactgtccgaatgggactgacgagtccccactttgcaatcaagacagctgctcccattttaatggtggctgtactcatcagtgcatgcaagggcccttcggagccacatgcctatgcccattaggataccaacttgccaatgataccaagacctgtgaagatatcaatgagtgcgatattccaggcttctgcagccagcactgcgtcaacatgagaggttccttccggtgcgcttgtgatccagaatatacgctggaaagtgatgggcggacttgcaaagtcacaggatctgaaaatccgttgttagttgtagcaagtcgtgacaaaatcattgtggacaacatcactgcccacacgcacaatctctactcgttggtccaggatgtttcttttgtggttgctcttgattttgattcagtcactggtcgtgtcttctggagtgacttactgcagggtaaaacctggagtgtctttcaaaacggaacagacaagagagtggtccatgacagtggcctctctgtgacagaaatgattgcagtagattggattggtcgcaacctttactggacggactatgctcttgaaacaatcgaagtttctaaaattgatggaagtcacagaacagtactgatcagcaaaaatgtcacaaaaccgaggggactcgcgttagatcccagaatgggtgacaatgtaatgttttggtctgactggggccatcaccctcgcattgagcgagccagcatggatggcaccatgcgcacagtcattgtccaggaaaagatctactggccctgtggcttaagcatcgactaccccaaccgcctcatctacttcatggatgcctatcttgactacattgaattctgtgattacgacggacataaccgaaggcaggtcattgctagcgatttggttctccaccatccgcacgccctcactctgttcgaagactttgtgtactggactgaccgtggtactcggcaggttatgcaggccaacaagtggcatggggggaaccagtcagttgtaatgtacagcgttcaccaaccgcttggaataactgccattcatccttcaaggcaaccaccttcccggaatccatgtgcctctgcctcttgcagccatctttgcctgctttctgcacaggcgcctagacattattcttgtgcttgcccttcaggatggaacctctccgatgattctgtcaactgtgtgagaggtgaccaacctttcttgatgtccgtaagagacaatataatttttggaatctcccttgatcctgaggtgaagagcaatgatgccatggtccccatatcagggatacagcatggttatgatgttgaatttgatgactctgagcaattcatctactgggttgagaatccgggtgaaattcacagagtgaagactgatggcagcaacaggacagtgtttgctcctctgtccctgctggggtcttctttaggcctggccttggactgggtatcaaggaacatttattataccactcctgcaagtcggtccattgaggtgttgacgctcaagggagatacgaggtatggaaaaaccctgattgccaatgacggcacccccctcggagttggtttccccgttggcatagctgttgatcctgcacgtgggaaactatattggtcagaccacgggacggacagtggggttcctgccaagatcgcaagtgctaatatggatggaacatctttaaaaattctcttcactgggaacctgcagcatctggaggttgtcaccctggacattcaggagcagaagctgtactgggcagtcaccagcagaggcgtgattgagagaggaaatgtggacggtacagagaggatgatcctggtgcaccatctggcccacccatggggccttgtggtctatggctccttcctttactactctgatgaacagtatgaggtcattgagagagttgacaagtcctctgggaataacaaagtcgtcctcagagataacgttccgtacctgaggggtcttcgggtttaccaccgccgcaatgccgctgactcttccaatggctgtagcaacaaccccaacgcttgccagcagatctgcctgcccgtgccaggtggaatgttctcctgcgcctgtgccagtggctttaagctcagccctgacggtcgctcctgttctccatataactcgttcatggtcgtttccatgctgcccgcagttagaggctttagcttggagttgtctgatcactcggaggccatggtgcccgtagctggccaaggacgaaatgttctgcatgcggacgtggatgttgccaacggctttatttactggtgtgattttagcagctctgtaagatcctctaatggaattcgtagaatcaaacccgacgggtctaattttaccaacgtcgttacctatggcattggggcaaatggaatccggggtgttgcactggactgggcagcaggaaatctttattttaccaatgcctttgtgtacgaaaccctgatagaagtgttacggatcaataccacgtaccgccgtgtactcctcaaagtctcagtggatatgccccggcatattattgttgaccccaagcatagatatctcttctgggccgactatgggcagaagccaaagatcgaacgctcttttcttgactgtaccaatcgaactgtccttgtttccgaaggcattgtcacccctcggggcttggccatggaccatgacactggctatatttattgggttgatgactccttagatttaattgccaggatccatcttgatggaggagaatctcaggtggttcgctatggcagccgttacccaactccctatggcatcactgtgtttggagagtctatcatttgggtggatagaaacttgaaaaaagtcttccaagccagcaagcaaccagggaatacagatccacccgtagtgataagagataagatcaacctgctccgtgacgtgaccatctttgacgagcacgcccagcccctctcaccagcagagcttaacaataacccttgtctgcaaagcaatggtgggtgttcccacttttgctttgccttacctgagttgcctactcccagatgtggatgtgcttttgggactctgggaaatgatggcaagagctgtgctacctcccaagaagatttcctcatctattccttaaataattccctgagaagtttacactttgaccctagagaccatagcctacctttccaagtgataagtgtggcgggaactgccattgcactggattatgaccgtagaaacaatagaatcttcttcacacaaaagctaaactctctccgtggccagatttcctatgtcagcctgtattcagggagcagctctccaactgtcctgctgtcaaatataggggtgactgatggcattgcctttgattggataaatagaagaatttattacagtgacttttcaaatcagacaataaattccatggctgaagatggatccaatcgtgctgtgattgcccgtgtttccaaacccagagctattgtattagatccttgccgagggtacatgtattggactgactggggtaccaacgccaaaatcgagagagccacactgggaggaaacttccgggtccccattgtgaacaccagcttggtttggcccaatggactcgctttggaccttgagactgaccttctgtactgggcagatgctagcttgcagaaaatagaacgcagtactctcacgggcacgaaccgagaagtcgttgtcagcactgcctttcattcctttggcttgactgtctatggccagtacatttactggacagacttgtacaccagaaaaatctaccgggctaacaagtacgacgggtcagacctggtagcaatgaccacacgtttgcccacccagcctagtggtatttccacagtggtcaaaacccagcggcagcagtgtagcaatccttgtgaccagttcaacggaggatgcagccatatctgtgctccaggtccaaatggagctgagtgtcagtgtcctcacgaaggcaactggtatctggccaacgataacaagtactgcgttgtggacacggggacccgctgtaatcaactccagttcacctgcctcaatgggcattgtattaatcaggattggaaatgtgacaatgacaacgactgtggtgatggcagtgatgagcttcctacagtctgtgcctttcacacctgccgatcaacagccttcacttgtggcaacgggcgatgtgtgccataccactatcgctgtgattactacaatgactgcggggacaacagcgacgaggcaggttgcctgttcagaaactgcaacagcaccacagagttcacgtgcagcaatgggcggtgcataccgctcagttatgtctgcaatggcataaacaattgccatgacaatgacacctcggatgagaaaaactgccctccccacacttgcccgccggatttcacaaaatgccagaccacgaatatttgtgttccccgagctttcttgtgtgatggagacaatgactgtggagacgggagtgacgagaaccccatttactgcgcctcacacacatgccgcagcaacgagttccagtgcctctcccctcagcggtgtattccaagctattggttctgtgacggtgaagccgactgtgcagatggctcggatgaacctgacacttgtgggcattctgtgaacacctgcagggccagtcagttccagtgtgataatggcaggtgcatctcaggcaattgggtctgtgatggtgataacgactgtggggacatgagtgacgaggaccagcggcatcactgtgagcttcagaactgttccagcactcagtttacctgtgtcaacagcagacctcccaacaggaggtgcatcccacagtactgggtctgtgacggtgatgcggactgctcggacgccctggacgagctgcagaattgcaccatgagaacctgctctgcaggggagttcagctgtgcaaatggacgatgtgtcaggcagtcattcaggtgtgatcggcgcaatgactgtggagactacagtgatgagaggggctgctcgtacccaccctgccatgcaaatcaatttacgtgtcagaacgggcggtgtatccctaggttctttgtttgtgatgaggacaatgactgtggagatggttctgatgagcaggagcacctgtgtcacaccccagaacccacatgcccccttcatcaattccggtgtgacaacgggcactgcatcgagatggggcgagtctgtaaccatgtggacgactgctcagacaacagcgatgagaaaggctgtggcattaacgagtgcctagattcttcaatcagtcgctgtgaccacaactgtacagataccataactagtttctactgttcctgtctccctggctacaagctcatgtctgacaaacgctcttgcgtggatattgacgaatgcaaggagtcaccccagctctgtagccagaagtgtgagaatgtggtaggctcctatatttgcaagtgtgcccctggctacatccgtgagccagatgggaagagctgccggcagaatagtaacatcgagccctatctcatctttagcaaccgttactatataagaaacttaactacagatggctcatcttactccctgattttgcaaggattgggcaatgttgtggccctggactttgatagagtagaaaagaggctgtattggattgatgcagagaagcaaatcattgagaggatgtttttgaataagacaaaccgggagaccatcataaaccacaggttaagacgtgctgaaagtctggctgtagactgggtcagcagaaaactctattggttggatgccatcttggactgcctgtttgtctctgaccttgaaggtcgacaccgcaaaatgatagcccagcactgtgtggatgctaacaataccttctgctttgaacatcccaggggaattgtccttcatcctcaaagagggcatgtctactgggcagattggggtgttcacgcatacattggaaggattggcatggatggaaccaataagtctgtgatcatctctaccaagatagaatggcccaatgccatcaccattgactacaccaacgatctcttgtactgggcagatgctcacctgggttatatcgagttctctgatttggaaggtcaccaccgacacacggtgtacgatggatcactgcctcacccctttgctcttacgatttttgaagacactgttttttggacagattggaatacacggacggttgaaaagggaaacaaatatgatgggtcaggtcgagtggtgctggtgaacacaacgcacaaacccttcgacatccacgtgtaccatccataccggcagccgattatgagcaatccctgtggtaccaacaacggtggctgttctcatctgtgcctcatcaaagcgggggggagaggattcacctgcgcgtgtcccgatgacttccagaccgttcagcttcgagacagaacactctgcatgcccatgtgctccagcacgcagttcctgtgtggcaacaatgaaaagtgtatccccatatggtggaaatgtgatggccagaaagactgctctgatggttctgatgaaccagacctgtgcccacaccgcttctgccgtctggggcagttccagtgccgggatggcaactgcacgagcccccaggctctgtgcaatgctcgccaggattgtgctgatggctctgatgaagaccgtgttctctgtgagcatcaccggtgtgagtccaacgagtggcagtgcgccaacaagcgttgcatcccacagtcctggcagtgtgactcagtgaacgactgcctggataactcagatgaggacacttcgcactgcgccagcaggacctgcaggcccggccagttcaagtgtaacaatggtcgctgtatcccgcagagctggaagtgtgacgtagacaatgattgtggagactactccgatgagcccatcgacgagtgcacgaccgctgcttacaactgtgacaaccacacagaattcagctgcaagactaactaccgttgcatcccgcagtgggcggtgtgcaatggttttgatgactgcagggacaacagtgatgaacaaggctgtgaatcggtgccatgccatccttctggggatttccggtgtgcgaatcaccactgcatccctctccgctggaagtgtgacggcactgacgactgtggagataactcggatgaggaaaactgcgttcctcgggagtgctcagagagcgagtttcgatgtgctgatcagcaatgcatcccctctcgatgggtctgtgaccaagaaaatgactgtggagacaactcggatgaacgggactgtgagatgaagacctgccatcctgaacattttcagtgtacgagtggacactgtgtgcccaaggcgttggcatgcgatgggagggcagactgtctggatgcgtctgatgaatctgcttgtcctactcgctttcccaacggcacctactgcccagccgccatgttcgaatgtaaaaaccacgtgtgcatccagtcgttttggatatgtgatggggaaaatgactgtgtcgacggttccgatgaggagatccacctgtgcttcaacattccgtgtgaatcaccacagcgattccggtgtgacaacagccgctgtgtttatggccatcagctgtgcaatggtgtggatgactgcggagatggaagtgacgagaaagaagagcactgtagaaaaccaacccacaaaccgtgcacagacactgaatataagtgtagcaatgggaactgcatttcgcagcactacgtgtgtgataatgtgaatgactgcggagacctttctgatgaaactggttgcaatctaggagataacagaacgtgtgctgaaaacatatgtgaacagaactgtacccagctgagcagcggaggctttatctgctcctgcagacccgggttcaaacctagtacttcggacaaaaattcctgtcaagacatcaatgaatgtgaggagtttggcatctgcccccagagctgtcgaaacagcaaaggaagttatgaatgtttctgtgtcgatggcttcaagtctatgagtacccattatggagaacggtgtgcagctgatggaagccctcctctcttgctcctgcctgagaatgtccgaatccggaagtacaatacctcctctgagaagttctcagagtatctggaagaggaggagcatatccaaactattgactatgactgggatcccgagcacataggcctcagtgttgtctattacactgtgctggcacagggctctcaattcggtgctatcaaacgtgcctacattcccaactttgaatctggtagtaacaatcccatacgtgaagttgacctgggcttgaaatatttaatgcagccagatggattagccgtggactgggtcggaaggcatatttactggtcagatgctaagagccaacggattgaggtggctaccctcgatggaaggtaccggaagtggctgatcaccacccaactggatcagccagctgccattgctgtgaatcctaagctagggcttatgttctggactgaccagggaaaacagcccaaaatcgagtctgcctggatgaacggggaacatcgcagcgttctggtttctgagaaccttggctggccaaacggtctttccatagattacctgaatgatgaccgggtctactggagcgactccaaagaagatgtcattgaagccataaaatatgatgggactgacaggagacttatcataaatgaagcgatgaagcccttcagtctggacatcttcgaagacaagctatactgggtagctaaggaaaagggagaagtgtggagacaaaataaattcgggaaagagaacaaagagaaagtgctggtggtgaacccgtggctcactcaagttcgaatcttccatcaactgagatacaatcagtcagtgtccaacccttgcaagcaggtctgtagtcacctctgcctgctgagaccaggaggctacagctgtgcctgtccccaaggctccgacttcgtaactggcagcactgtccagtgtgatgcagccagtgaacttcccgtcaccatgcctcccccatgcaggtgcatgcacggaggaaattgctattttgatgagaatgaactccccaaatgcaagtgttccagtggctatagcggagaatactgtgaggttgggctctcgagaggcatccctccagggacgacaatggctgttctgttgaccttcgtgatagtcatcattgttggagctctggtgcttgttggactctttcactacaggaaaactggctccctcttacccactctgcccaagctgccaagcctaagcagccttgccaaaccctctgaaaatggaaatggggtgacgttcaggtcgggggctgatgtgaacatggacatcggtgtgtctcctttcggccctgagacaattattgacagatccatggcgatgaatgaacactttgtcatggaggtgggcaagcagcctgtgatatttgaaaacccaatgtatgcagccaaggacaacacttccaaagtggccctggcagttcaggggccatcaacaggcgcacaggtgactgtaccagaaaatgtggaaaaccagaattatggaaggcccatagatccttctgagatagttccagagccaaagccagcctcccctggagctgatgaaattcagggcaaaaaatggaacatcttcaaacgaaaacccaaacagacaacgaactttgagaacccaatctacgcagagatggacagtgaggtaaaggatgctgtggctgtggccccccctccgtctccttctctccctgccaaagcttcaaaaagaaatttgactccaggctacactgccacagaagacacctttaaagacactgcaaatctcgttaaagaagattccgacgtatagcctcgccagctctctagggaacatttagacactcacttttgcacatatattttttacagacaaatgaaaaagaagttaacattcaatactttataaaaaaaatatatttttctctgtttgcctataattgaaggtgtgtcgtgtgtcttttttactgatgccacttcatatttttacaattatcacgggcactgtgtatatcttggactgatgttgtctggaggtgatgctgtgaacattactggacttgtgtaaactttggaaggattatcacacctctgcccctgctaacacgaaggtgcccgttgagtgggtcgctgagctgaagaatacacgatctggtgaggaaaggaattggcctagggctttggatctgtctagagaggagataacactcatatttcctttgaaacaatacaggaattctttatgctcatttgagggcccatttttacacattggcacttaattaatagtcaacgttcaacatcacgtgtcaacctgattagtgagtgtgcagataggggccagtgttggcttcatgcgctgtagatggctcagacaacacagacggtacacagggtgactcagctggacccttctgcgctcctccgccttctgaggccagctatgttttgattgtgcttcgtccctagttgccaagtcaacatttgcacctgccgtgtcacgtcccatactgagtttctgtctcatggaacgagctcttgcttgacagaccttaaatcaacttaagcccttgcctgtcatctcaggtgtcccctaccttcgtgactggaattccgtagttgactgtatgtactaaagccagacccgtgtctccacagagcagggcgccgaacagacaccagtcgatcgaagcctcagctgggtgtctgactctgggtgcacaatgttattgtactgactatttatttcctcagttgacgacgaatagaaagggaaaacattcttcctgagcctttctcaggcctttgcctaaatccgtgcatttgtgtccgaacgtactgtacgtcccagctcttcttttgagtggttggtgtatcctctgtcacaggaagtatggcacgagcatgcgttttccacagcgagtagcattcctggttctctgtgttcaccttgcacatgtgttaatgaatgaatgggagggtgggagaatggatgaatgaaatatactactgattattttattctcgagtcctcgaaatattttgttgctcgtattttgagtacccattgtaattactttgattagaaattaaaaagctactggaaacgctgctgctggaaatttctaataaatgtgtattttatc

SEQ ID NO: 663 - DNA, 551 bp, Rattus norvegicus
aatacaaagctttggcattagcaattttatgaaaaaataaaatgtactaaaaataaacgcttgtgtggcatgattggtaaatgatgcacaaaaataggttcttttttccttcaaggcaatcagtcagaaagcagtgttttccttcttcaaaaccattctaccttgttactgcaatgttgatttcacccgttcgaggagtgagctccccatcttgaggaagaggcgatatcccagaagttctcagtggctcaaggccaagggaactgtcattggcaaggtcaccaagggctgatcttcggttaactgcctgggttctggtgagcctttccatatcaaacgctacattatcagtacatggcagatttggcacaattcctagggctttcaaaatattaagtttacacataggacaggtacagtgttcactgagccagggatccacacaggatttgtggaaaacatgcttgcaggggagaacccgaacaacatcattctgcttatagctctctatgcagactgcacagtgatcgaagtctgggtctgtttcctta

SEQ ID NO: 664 - DNA, 537 bp, Rattus norvegicus
aaagagtctctgctgtctacagggagcaccctgcagacaaaattttattctctatagaaacaaagtcactgcccagcacctcccttgtctttatccatagcagaaaaaccagccgctccctctagggggcgacagcagtcctgggggcgaccagtggagatgaagtacttgctggaaggccttggttctggttcccagagacagctgtcgtcctcctcctcctcagactccccctcagactcaggcacgctctcgggaagggcaacggccatctgctggaatctccctgactgggcatcccacatgtatttgatgggcactttgaattcggccatctcatacccaaacagcttcaggacaaggacctgctctggggtcagcacgtcaccctccttgcacacttcatagtcagacagcaggggcaccagacctttcttgagggcagtgggcagtcccagctgcctcagctgtggctccatggaatgagggaactgtttcagcggccctggatccaggctcacagttaaagttgctttg

SEQ ID NO: 665 - DNA, 591 bp, Rattus norvegicus
aacaaacacctaatatttattaataaattagtatacttgaaggcatttttctgatatcagttcctcaccactaagcccacccacacaaaggcagtgggcgtctagctctgcattagagtctgacaactgagcatcagaggacaggttgataaatgagagagcgtagttgcaaatttatcggacaggagttcttacagctgcagccatttttaacgaaagtggttggatgacaaaggaaacccagcaaggccttgagggcagactggacctatagactatgtgtattgagagagagagagagagagagagagagagagagagagagagagagagaggaataaaaaaaataagagaaatatcttttaaagcaaagctgggcataaagtggctttccaaggtgcagcaaaggtgttcctaaaagatgaagatcgagttctttggcggcccaggtgtcaagccactgaaacagcaagtcctggggacttaaggatttcattctccagcccagagcttagcagcattaacgggagcacaagttacaagcagtgtacggtgtccagacgagaaccatacagcgagcgatagagagtg

SEQ ID NO: 666 - DNA, 249 bp, Rattus norvegicus
gacaaaagacctgctaaaagcaacttatgtaaggaagggtttatcttggctcacaatttgaaggcatatattccatgtttgacagacctgatgatctgatcattcccttctttttattcagtctggggccctaccccatggaatggtgtcacctacgttaaagatcagtcttctctccccacttaaaacttttttgaaaacaccttcatgtacacgttgtatttacatgattccaaatccagttaagtc

SEQ ID NO: 667 - DNA, 548 bp, Rattus norvegicus
gcacccctaaccaaacgttatattctgggctttacagataacacaaacaactgtgatgtggcaattatgcttttaatggagatataaaacttatcaatgcaaaagaaagttttatataacattagcaatagtgattaacttaaaattatgttttaataatgtgaaatacagtgtgttagacctcaaaaaagaaaccacaaagttccccgcaacctaaaatgttggaaaggctccttaaaattgtttttacctaccaacgatttaatactcagtggcatctggggggacgtaagaaaatatggagctcttttcagctatgatttggagctttagtaaagctctatggtaatgtcactgtgggaagaaccataaaattctcccaaaagtacttccaatagcataggcaactcagaggcttaatattaatagttcaaagcttagaaagcagctgctatcctgaagaattgtaaaagatcaatcctgctactctttctaaaatacagacataacccaaggatgtcagttctgtgaagtttcagggaaacact

SEQ ID NO: 668 - DNA, 2699 bp, Rattus norvegicus
tcgggtctggtctcaacagcctggtctgggggagtcactccagatgacatccactgtcccggaactctgccaagaggggggtgggtcaggcgaaccagtttagggagcccccgcccttccctgctgctcagcgtcacgcgtgacgtccgggtgatggctgggaggaaagcggagagctgtgaggaaggcgggtctgagagctgctagaggctgtaaatccccggaaagcaagatgggcgacttgcccttaaatatcaacatccaggaacctcgatgggaccaaagcacattcctaggcagagcccggcacttcttcacagttactgatccccgaaatctcctgctgtccgggaaacagttggaagcttctcggaacatcgtgcagaattacagggctggtgtggtaactcctgggctcactgaggaccagctatggagagccaaatacgtgtatgactcagcattccacccggacacaggggagaaggtggtcttgattggtcgcatgtcggcccaggtgcccatgaacatgaccattactggctgcatgctcaccttctacaggaagactccaactgtggtgttctggcagtgggtgaatcagtccttcaatgctattgtgaattactctaatcgcagtggagacgctcctatcactgtgcagcagctgggaacggcctatgtgagtgccaccactggggctgtggctactgctctgggactcaagtctctcaccaagcacctacccccactagtgggtcgattcgtaccctttgcagctgtggctgccgccaactgcatcaacatccccctgatgaggcagagggagctgcaggtgggcatcccagtgactgatgaagctggtcagagacttggccactcggtgactgctgccaaacagggcatcttccaggtggtggtatcgagaatcggcatggcgatccccgccatggccattcccccggtgatcatgaacactctggagaagaaagacttcctcaagcgccgcccctggctgggggcccccctgcaggtgggactggtaggcttctgcttggtatttgccacacctctgtgctgcgctctttttccccagagaagctctatacatgtgaccaggctggagccggagctgagagctcagatccaagcacaaaaacccagcatcgatgtggtttactacaacaaggggctttgaggggaatcggcctctgtccctgtccttacctccttaggctgcttctttggtgccacttctcaatgctaccacctgtttaatcttccgggtactgggcaggggggcttgatgtggggagcagccactgagaccagcaaccttagactgggggaggcacccctataagcctcttctctcctctctggtttcaaagagcaagtcacaaagcccatccctcctgtgtctgtgtgcgtgcgtgcagacatacctaggcagtgcatggaactgttcgttcatttgctcctgaatgctaaggcagaagtgctgttctaggatgtcctgatgtttgtcttctctctcggtctcctgcccacctcacagcaagccaggtgataggcgagaatcctttccctaagctattcctctggccaagtcatttctgatagcatcttagccttctgaccccaagataagcgccaggatcccagaacacagactgaaggacatctgcagatcttaacccttccagttttgaatagctggctctgaaagctggttcaggagctgggctggcagaggaagcagggtgggatcagggaagcagggggctcatacttgctggactccacatcctgggatggctccactcctctcttctcttcctatggaacatgaggatgtctctgtagcctgcagtgcccctaccctgcttttagagatagtcttgggcattcttggtctgttctgatgactcatgtcatgactcagaaagaaatcccacaatcccaattccttccccaattagaaagccacacaggcagagcaagcattctcttcaggaactgccaccccctgtacccacttatagggggaccggtgtgggaacggtgcttaaacacaggcctcaagcgtacaatatcaagacaggtaattctgtgtttcattgactcctcttagacacacccacctcagctccttcctttccatctaccccgtctctgaaagaacccagggcttcacaatgctaggcaagtgctctaccactgagctacatccccagtgccccctcttccttccttcctgtctctttctttcttttttgtttttgtttttcaaatatggtttctctatgtagccctggctgtcctggaactcagagatctgattgcctaagacagtgagttctgggattaaaggcatataccaccattgccagcagcccttcttgttcctaagacatggatggccctgtgctccctctgcccttcaaaaagaggagggacccaggccttcatagctggaccaaatggaagatgggtttaggaatggcatgagtggtaatgactccagtgtgtagaattatatctgcactctaaatccatgacctctagctaaaaggcgaatggggtccccagtgatatccacggagaccactttcactcaccccctcctccagtgacaacaggtgtcatgtcatggtgtcaataaactgcagtcctgtctaaaaaaaaaaaaaaaaaaa

SEQ ID NO: 669 - DNA, 536 bp, Rattus norvegicus
ccccaatgaggcacatttattaaaacataaattattaacttaaaagcaatccaccttctgcgctgtagatggctggcatacggggcgagcaggatggcaggacgaatataaagtgaccacactgagaagcagagcaaaggtgtctacatctgcaggctggccccggctgcttctactgctgagactagctctgctccttccttctagacatacaggggtcattcctcacagaccactcttgcagcctggaaactcccccctcccccgccaagcccattctgttatgaacatgggactttctccttcaggaatctctgcctttggaaattctctgatcatcaaactgtgagccttcctcttcttcaattatcccatcatctctggatgctgaggcccctattgcagggatcacactcgagtctggcatcagttgctgcacaacaggatcctgccggcagcactgaaccgggtatgtctgcaacaaacagaccgagcatggccggagacactgcttccgtgggttggtcagcagaacc

SEQ ID NO: 670 - DNA, 1356 bp, Rattus norvegicus
atgaccagcaaggttcccgaggaggagcacccatcggtgacgctcttccgccagtacctgcgcatctgcactgtgcaacccaatcctgactatgggagtgcggtcaccttccttgaggagagagcccgccagctgggtctgagctgtcagaaaatagaggtggcgcctggctatgtgatcactgtgctgacttggccaggcaccaacccgttgcttcattccatcttgctaaactcccacacagatgtggtacctgtcttcaaggagcattggcatcacgacccctttgaagccttcaaggattccgagggctacatctatgctaggggcgcccaggacatgaagagtgtcagcatccagtacctggaggccgtgagaaggctgaagagcgagagccaccggttccccagaaccatccacatgacatttgtgcctgacgaggaggtcggaggtcacaaggggatggagttgtttgtgaagaggcctgagttccaggctctgcgggcaggctttgctctggatgagggcctggccaaccccactgatgccttcaccgttttttatagtgaacggagtccttggtggatacgggttaccagcactgggaagccaggccatgcctcacgcttcattgaagatacagcagctgagaagttgcataaggttgtaaactccatcttggcattccgggagaaggagaggcagaggctgcaggcgaaccctcacctgaaggaaggggccgtgacttcggtgaatctgactaagctcgagggtggtgtggcctataatgtggtacctgctaccatgagtgcctgttttgacttccgagtggcgccagatgtagacatgaaggccttcgagaagcagctgcagagctggtgccaggaagcgggagagggggtcacctttgagtttgctcagaagtttacagagcctcgaatgacacccactgatgatacggacccctggtgggcagctttcagcggggcctgcaaggaaatgaacctcactctggagccggagatctttcctgctgccactgacagccgttatatccgagcggtggggatcccagctctgggcttctcgcccatgaaccgcacacccgtgttactacatgaccataacgaacgactgcacgaggctgtgtttctacgtggagttgacatatatacacgcctagttgctgcacttgctagtgtgcccgctctgcctggtgaaagctgagccccaggccttccaaccctcatagctttcagcccaaccactgccaaggatctgttgcccccgcccagtaataaagccagtgttgaatgggatgttcttcaaaaaaaaaaaaaaaaaaaaaaaaaaaaa

SEQ ID NO: 671 - DNA, 1555 bp, Rattus norvegicus
cccagcggagggttccggctgtggccagtacctcagcatctacgcgtcgcccggcaggtccggggctccggtccgtgccggtgcaggcgccggcatgtggctgtgggaggaccagggcggcctcctgggccccttctctttcgtgctggtgctgctgctggtggtgacgcgcagccccttcaacgcctgtgtgctcactggcagcctctacctcctgctgcggttcttcagcttcgagccggtgccgtcccgccgggccctgcaggtgctcaagccccgtgaccgcgtgtccgccatcgcccatcgcggcggcagccacgacgcgcccgagaacacgctggcggccatccggcaggcagctaagaatggagcaacaggtgtggagctggacatcgagtttacttctgatggagttcctgtcttgatgcacgataacacagtagataggacaacagacgggtctggccgattatgtgatctgacatttgaacaagttaggaaacttaatcctgcagcaaatcacagactcagaaatgagttccctgacgaaaggatccccaccctgagggaagcagttacagagtgcctctgccataacctcaccatcttcttcgatgtcaaaggccatgcagatatggcttctgctgctctaaagaatatatacatggaatttccccagctgtacaacaacagtatggtctgctcattcttgccggaagtcatctataaaatgagacaaacagatcagaaggtaatcacagccctgactcacaggccttggagcctgagccacactggagacgggaagcctcgctacagcgtcttttggaagcagtctgtgtttgtggtgttggacatcttgcttgactggagcatgcacaatgtcttgtggtacctgtgtgggatttcagccttcctcatgcagaaggattttgtctccccggactatttgaagaagtggtcagccaaaggaatccaggttgttagttggactgtcaatacctttgatgaaaagaattactacgagtcccaccttgggtccagctacatcactgacagcatgctggaagactgtgcacctcacttctagactccccaggaggaaacacagatgcaaaactgcctggaggccttttgcagggacacgagaacactctgttagcacaagccctgggaatcctgcggctcatactagcaatagccacagttttaccccaagcagaaaccaggcatggcgaccatgctccaaggaaggctccacacttgcccttaaaattctggatctgtgaaaaggcagggtggccctacccaaccccgctgagggtacagagccacaaggatgagcagagtgggtcctgcaattagggcgcaggcaccaatgcatgggcttgcatgatcactccaagttgacattttaaatcttgctatacttcagtaattcacttatttccaatatttgtcgtcagctctgttaatggcgacatgtaggtgtcaaacttgtgaccatactaataaaatcattgaaaggtgaaaaaaaaaaaaaaaaaaaaaaaaa

SEQ ID NO: 672 - DNA, 596 bp, Rattus norvegicus
agaacaaaacaggtatatttctattggactacctggtacagacagtgtggcatggatggataatatgaatgacaaataatacaaatatattttatttgaaataaacaaaaatgcttacacagctttcatttgcaaacaaactcctgcttgactgtattactgagcaaaaaaagagaacagagccgaagccaacaccttctgttgtaacttgtccttggggacaggcaggaagacactacttggtgttttaaaatctgaccttcccctaaggcctggtcatagaagtgtaaacaatgtaaatgaatccactgttaccagttgtcataggtcatatcacattacctgtgtgttctaagatcacacacacacacacacacacacacacacacacacacacacacacacacacacacacctgccaatatacctgggaaggtagctctgtcacagttatatgagttctaggcaggtaggatgatggagaaagagtaacttggaatgaattttattttacatcctgtttagaagaaagcactagcattctctgaaataccaggttatgacagacagatactgcctgggaaccctccttttca

SEQ ID NO: 673 - DNA, 523 bp, Rattus norvegicus
catggtgcaacctttgacctttattcatgtcctgccctcccaccaagtaaagtcaaatacaaggctactacccaaagcagaaaccccagtccctatcctagactcctcctgtgagccaaaaatatataaagtgctggtgtgtaatatggggaaggccaaacggactaagaaccccacccctggacctcatcaggaggaggagccctgcaaaagaagggcagggcaccaacctagttcccagaggcagggagaaggggcctagcagcccccacttggggctggggaaactcatgcagtccagggcagaaaggaaccaaaaaagaaactggcagcatgaaatcctacaaggatgaaatggggggaggggggtctgtacccctgtgaagggaagagtgggagggttaaggaggctttggggaattcagagaatgggacagcccctccggcgcttattcttccggacctgtaggccagcccgagtggccatctcaaatacctcccgcaccccttccttactcttggc

SEQ ID NO: 674 - DNA, 550 bp, Rattus norvegicus
gaaagaatgcactttttagtagatatgagtgtgagactcttgtctcgttattgctggtgtgcttctcggtctctggcagcagtgtaattatctgcgcatgcctgacctgcagtcaggcggtagaggggccaagcatctccgctccgggcagcagtactggttgtgcgtctttgactccacattagcgtgctccttcagtgttgccttcctcctgccttctgtttattccacgcatctcagcagaggaaacagcagcgctgctcctaaattcactctaagccactgacaggaagaatttgggctgtgctataaagtttccaatatgtctcgacattgttctccagctggtggtgatacttggggatacgatggcatctttactaatggggacaatgtatgcatgaattataaaccagagacgggagagatggccaagtggttaagagtgcttcttgcagcagatccaagttcaggtcccagggcccacatcaaaatcacctgtaattctagttgcaggggatcagataccctcttctggttccgtgtgtgc

SEQ ID NO: 675 - DNA, 343 bp, Rattus norvegicus
ccatcagcattaatgaatgagaatattttattttaaatggaacatgaagaattaaaatacagcctgaaggtttcaattttgtactgtgaacatcaagacagcaattacccctaagaaaaaaattcacagaaacatgttgaactaactgaacagaaaccagagtgggtatttaagtcattacatttctcatcattgtgaaaacagatgtcctctaacaactccagtctacagacagcacacttcatcataacactacatttaaaacactacaaacgtttacaaagaacatttggatttcacaattgcctatagaatatctttcaatattaaaacaccatgatgc

SEQ ID NO: 676 - DNA, 443 bp, Rattus norvegicus
caccagttaaatttaagaacctctctcgtctctattaacagataggaagcttcagggaccaggtactttgaggagctttctgagccagtgaaagaaaacaaaatatttcctggaactggtaagcttgctgttttcagagtgtcaacaagcaaacacacacgccacacacgtacctcgtgaaaacaatgccgctctggcccccggccacactgcctgcaggcactgctgcgtgtccttgtcagtgaatgttaatgcagaccactgggagctgaaggcgagggagctccctgagggagtgtaggcagcagccctgccaccagcttctagagatctagatgtgagctgcaatctgcgactccatcttggcctgagcagggctggaaggagcacaacagcacgtaccagtgtatggggaaaagaactgacatggctggctccggctg

SEQ ID NO: 677 - DNA, 2325 bp, Rattus norvegicus
tttttttttaggagcccgcgcctcggtttcagcggacgcttcccctgatctccgttctaccaccatccactgccgtcttaccacccaccatggccctcctgcactccggtcgcgtcctctccgggatggctgctgcctttcacccaggccttgcagccgcagcctctgccagagccagctcctggtggacccatgttgaaatgggacctccagatcccatcctgggagtgaccgaagccttcaagagagataccaacagcaagaagatgaacctgggagttggtgcctaccgggacgataacggaaagccttacgtgctccccagtgttcggaaggcagaggcccagattgctgggaaaaatttggacaaagaatacctacccatcgggggactggctgatttttgtaaggcttctgcagaactggccctgggcgagaacagcgaagtgttgaaaagcggccggtttgtaactgtgcagaccatttccgggactggagccttgagggtcggagccagctttctgcaaagattttttaagttcagccgagatgtctttctgcccaaaccatcctggggaaaccacacgcccatcttcagggatgccggcatgcagctgcaaggttatcgatactatgaccccaagacttgcggctttgacttctctggagccttagaagacatatcaaaaatcccagagcagagtgttctccttctgcacgcctgcgctcacaaccccacgggcgtggacccgcgtccagagcagtggaaggaaatggcggcggtggtgaagaaaaagaatctcttcgcattctttgacatggcctaccaaggctttgccagcggcgatggtgataaggacgcctgggccgtgcggcacttcatcgagcagggcatcaatgtctgcctctgccaatcctatgccaagaacatgggcctgtacggtgagcgtgtgggagccttcactgtggtctgcaaagatgcagaagaagccaaaagggtggagtcacagctgaagatcctgatccgccccttgtattccaacccgcctctcaatggagcccggatcgccgcaaccatcctgacttctccagacttgcggaagcaatggttgcaggaggtgaaaggcatggctgaccgcatcatcagcatgaggacccagttggtctccaacctgaagaaagagggctcgtcccacaactggcagcacatcaccgaccagatcggcatgttctgcttcaccggcctaaagcctgagcaggtggagcggctgaccaaggagttctcagtctacatgacaaaggatggtcgaatctctgtggccggggtcacctctggcaatgtgggctacctggcccacgccattcaccaggtcaccaagtaatcaccaggtgcaaggaaacagagatcactttcccttcagcctttgctctcatgagagtcacgtgcagggtgagggagggtggatggtgttgagtagatcctgttttcaaccacggtgcataactcctgtcgattgaacgcgttcctcggaaaagaggtagggcagaggctcccacggctgatatctggaacttcgtcggctctaaaccaaactctccctcatccttttgtctccagcttttctgaaagtttacacatgcaaaaaaatcacagcaccaaaacctgtcagcatggcataggcacaggtcagaagctttacctgaagcctcaggtggtgtcaggggttcccctgtggaccccggtagagcctctcatattagaggctgtaagagaagaataactagttctgtcattaacagttgtcgagtgtgtcctcgtggtgtggagcaactgtgtcagcagaccacattatggaaattatgctttacaaaaaccaacagggacagtagaagatgtaatgtcttgtcatggctgttctgtagcctggagtttcatcccattctactgctcggttgaccatcaacctcatccttaggagtgatctaagaataaagaatgtagtttttctgttcatgccataaccttctgtctcagcaaagagccggggagagtgggaccctgcccttgatttcagagtcctcttcagtgattgattggctcctacgggggtggggcctctgcccagctggacgtcctcattcatcctgactgcagcctgtcttcacatgagtcagacatgcagggtaggatcggaaggagctattctggggtttgtatgctaccagcccggctcagactcagcccttgggaaagataaccaccatctgctctaaccgtgtagacgtacctggttttctctgttacaataaaattactacagaccc

SEQ ID NO: 678 - DNA, 7628 bp, Rattus norvegicus
cccgctgtacttcaccaggcagtactaggccatagatcccgtgttccgggctcggcgctccgggcttcccagggctgggcccgggacgcggcctcccgccatggcgcagctggagggttattacttctcggccgccttgagctgcaccttcctggtgtcctgcctgctcttctccgccttcagccgcgctctgcgtgagccttacatggacgagatcttccacctgccgcaggcgcagcgctactgcgagggccgcttctcactgtcacagtgggatcctatgattactacattacctggcctgtacctggtgtcggtcggagtggtcaaacctgccagctggatccttggctggtctgagcatgtcgtctgctccatcggaatgctcagatttgtcaatcttctcttcagtgttggcaacttctatttgctgtatttgctcttcaggaagatacagcccagaaacaaggcttcttcaagtatccagagaatcttgtcaacattaaccctagcagtatttccaaccctctatttttttaactttctttactatacagaagccggctctgtattctttactctttttgcttatttgatgtgtctttacggcaaccataggacttcggccttgcttgggttttgtggcttcatgtttcgtcagaccaatatcatctgggctgccttctgtgcaggacacatcattgcacagaagtgcagtgaagcctggaagactgaactacagaagaagaaggaagagaggcttcccccggctaaaggaccgctctcggaactcagaagagttcttcagtttctgctgatgtactccatgtcccttaagaacctgagtatgcttttccttttgacctggccctacatgcttctgctgttggcatttttcgtttttgtggtggttaatggtgggattgtcgtgggtgatcggagtagtcatgaggcctgcctccattttcctcagttgttctacttcttctcctttactgcctttttttcctttcctcacctactttctccgaccaaagtcaagacttttcttagcttagtttggaaacgtagagttcagttctctgtgattactttagtctcggtatttttggtttggaaattcacttacgtccataagtatttactggcagacaataggcattacacgttttatgtgtggaaaagagtatttcagagacatgaaattgtcaagtatttattagttccagcctacatgtttgctggttgggctgtagctgactctttaaaatcaaagtcaattttctggaatttaatgttttttgtatgcttggttgcttctacggttcctcagaaactactagaattccgttacttcattttaccatacattatttataggctcaacatgcctctgccacccatatctagacttgtttgtgaactgggttgctatgcagttgtcaattttctaactttttacatctttctgaacaagacttttcagtggtcggatagtcatgacatccaaaggtttatgtggtagtggcagggctattttgaactctaagagcctatttctacaacagatgactgggtaaaggagtgtggatttcttttaagtaaattcagggagacgaaaagaattacatttgaggctagcctaaaagcttagataatgctaataaatttgcttgcagttgtcttgagaatcttttcagaagtttggggattttccgtgtatgtaggggactgggtgagctccgtagcaccagaacctgtcaaccaacttcctttgtaaagaacagtgaagaatgtgaaaactgtttacaaataaatgacctagtggtatttctgagcaaaattgccagatattgcagtaaatatagctctggtcttagtaacttatgaacgagattctgggatgtctatctaggaattgggtattttaactaagaatatagaagtgatgaagccatttgaactaactccttatttgaaggttttgcaggccgaaggtaagctgtgctgattatgacaccttttatagataatctttctgaaatactgctctgttagttgtccagggctcctgcacaaaactgaccataaaccttgtggcttcagagttttttctcacatacgaataagcagcacctaaactcgagtgctggcagagctcctaaactcgagtgctggcagagctcgctccttcaggagacaagagttcattgttcctgttcagctcactccttagaggggccttacttttagacaggtccctccagtctgtctgtgtctgcacaggactgtctccaccggcttcttgtgcagttaatgccattggctttagggatcctctgattcagggtaacggtacctggagaccctggattatatctatcacatttttaaagtaagttccctttcagaggtcccacatcattttggtgtgtgtgtgtgtgtgtgtgtgtgtgtgtgtgtgtgtgtgtgtgtgtgtgtgtaagtaagatgaccttgatgagagcttttaagtaaaagttagtttttaaaagagaggccaaaaaacaacaacaacaaaacccagatggccaaggtcatgtaatttacatttgtccctattatccaaacaaaccagaactcagaaggtgagaggtcattggtttagtttcattttataatttaggaagcactactaggctctggggtttgctttgtctgggttccggttctgtgctgctgtttaaagtttgtttattgattgtcaccattgttacagacactgttgcttagtcctgtgctgagagtgtaaacacggaagtgtgacttgggcttacttagcccacttcctgagctttacacacacacacacacacacacacacacacacacacactcactccccaaaggaacagaaccttttattttattggataatgttttctttgagttttaaatatgtagtaaactttatacaactttaaaaactacttggataaaagttacaagcatagccctgggtggtcagcccgcacagaccactctgatgcttcggaggtttgctcaagtgtaacagtgactggtgtgttagcacatcagaaagcttcatgacactttattatgatagaagctaagtccaggaagcaaacacttgcaattgaataaagcaagtgctgtctgatgcttagtccctggcttttgtgtctgggaacacagagggatggagtgcttcatcccagtagtctgctgtaaggagggaagcactttgtcccatgtaatggaaggaggctgctttcagatatgttgagtcccttcagaattaggagacatcgtaggggtctacagagagagagagagagagagagagagaaagagagagagagagagagagagagagagagagaaaataagtactggtattctacaccacttcccattatgtattggaagtaggacttggcatttcagactgcagtgccatggactaaaaggtgctatttagttgttactgtgatcttaaaaatggatgcatgttgatacatttgaggtaggggtttggttaatgttgcttgggcagttgacaagttaatggtcatttgctgataaatttctcagtcttttaactcagtatgtgagagaaaaaggcttcacccggcggttcacttttggttgttcaaattaacagccccatctctgaagtcatttcacttgggaaaaaaatccttgcttttgcaaatgtagattgtatttctactttaatttttaaaaagaattatcaagtagttttcattagacttaattgatttattgatcataagaggctcagtggttaaaagcttgagcccccattgcagggacccccgtgtggttccttgcccctagggcagcctctagggcactgactgcaggcttccagctctgcagcctcctgaactcatctgctgtaaacacactgcccaccgcctacttcagttaaaaactctaaatggtcagtgtagaaaatgtcagctgctgaaggggtgtggagtgcgagttctccatcactcttccagtggacattttagagcctttatgaagaggcccaggcttgcctgagctgctctaggctcagtggtcagttttagcagctctgctttctgtgacaatccacaggcatagactcacttcccagacacattagaacgagtgtgtgcactgtacctgcttatatttacacttccttggacagccttcccacggctgcgtctcaccaaaccttgtggacatagtgtgttgtactttacacatagtacataatcttgtacgaggaatttctgtgctcatggaccatctgtgtttgtcgttgtaaaacacccactgtaaacagtgtgatttacttacagggaatagcttaggatatccgtgatgtatttctggtgtgaacttacctgacttggacattgtgctcatctcctttgtctggagaggagagaagggagtcccagctttcatttataactcctagagagtagacatatattttaggtcaagttcaaactgtattcaggtaaaatcatatcttagagcagttagaaagcctttaaatgttaagacaagtgtaattttaatgtatacaatattttgcatagatgaacttaagatgtagaaaagaatgcccttgattttggttccacataaaaaagacagattgttgaaagacaggtgcttgttcctgatctcagatgagaatgttatgtttgaactcttgttagtacctggggtgagtcctaccgcatttcaacaggattcatgctgtagtacatatctgtatgctcataaacatgctgtttgatgtatatcgagtaaatttgtattgaatggagttttcaatatagaaggaagcagatattctagaaaagtatcatataaccaacttaatcttaggaagcaaatgtgttttatactaagccatcctgacccatcctctgcctgttttctgaatgttattttctatagtaatgaatttagtcatgcccgtttagtatgcgccgtgtgcaataggcttgattctaacaatgccatttaaatatgaagtcattcagtaattacagtaagtttgatgacttgtcttttacatttcaatcagttagaaacatcttctgtttggttttagctctctgatttacttttctttgggtgcattttaggtatttgaagtcaatggcaaaatgttgctgagaaatataaacaacttagttaatgatgacataattttaatatatcgaaatgattccagcactaaattccataatgtttggaagttatttctaaagtaaatttggtgataataggtatctaataatctctttttattatttaaaatgagatattgattagtggcattctccataccttagacactgttaaagcaaaagtaggtagggtatatttttctttcaaaaaagtaaatatatggaatttgcattcagaaatttgatcagttcaatttatttgagccctgtactttcactgtcttgctcaagatgaataagaatgaaaagaattacagtagttgtctttctcaatagtgttttgctggttcacacacacacacgcactcacactcacactcacacacatcataaagctgaccttttgctattttgtttcgctatcaaagctgtactggtctgacctctcatgttattgtgtgagttacaggtttttaaaatccttaggagccttttagaggaacatgtataaaatgataaacgcttaggttttattacaagatgagttgttgaacaaattgttgatgtttaattggaaaaacatagctcccataacaacaagttcttacggttatttgaaagcataatacattgctttaaatgtagatcagtggtcaacaaataggttttaactcacaaaaacaccctttcttaattatgttgtctctttaggggcatagagctcccctaaataagttttgtatttactgaaaacatttcactgggaaagcgtcagtggcttgagagagtagatatgggatagtgtcttttcaagggtctcaaaacctgccattttaaacgtgagtttattgtagttcatgttctttatattcttcggtaagtcaggttcaagaatctcttgaagtattctgcctttcatatattttgtttctgaaataaagtggatgtttagctttcgttaagctggtttttaaattgtgtcatacacccagccacaggtggtgtaaagtctcagcgcaccagtaatgcagtgtttacccacatacgtttgtgttcctttgtcaggagagaagtgtatttgggtttcccctgtagtgaggaataggaaagtactgtgtaatcaaatttgtactgaaatgtttactaggtgatgacagtgggctacattttaacgtattcttgtaatttaactttttctactagtctggattaaactttttatagttttgtattgttttgaaccacaaagatttagaattctccaccttcattaatgattatttgttgttcaggaagggtctcataatccaggctagcctggaatttacaatgtagccaagaaagaccttgaactcctgattcttttgcctctacctctggactgctgggttcccggcatgccgcaccatgcccagtgtatgcagtgctggggagcaaacacagaacttagggcagccggcaagcagtctgccagctgggctgtttcctccagccctgctgcttctactgtggccgaaaatgttccctgggttccatgaagtggaaggtaaatgtgaaaccaaaagtcatttgttccatgattaaattgtgtctcagatgacggaacctaatgcacccggccatgaaactgtttacctcacagactgggggatgtttctgatagtgataataggtttggaaacaacctgaactgtctacttctgtctcgctggttctcaggcctcttgtgttaactgtaccacatacacggagagactgaggagagggtgggtttttgtctcatattagaataagcagaatgagtatttgtctaatgttacaaagtagctgtgtgagctgcctttatgagtgggcagcctgacgagaatcgggctcttagctgcagctgagatggagtagtaggaaggacactgagtctaccttcctttttgtaacattttggaaaacaaattccatgggaaatagaactccactacttttctagatcagacagttgaggcgcatacagactgtctcttccagagcaggcagtctctcccattgtgtcatcacggcctcagcttgttgtgtgaacacaaaatctacagcacgggctgaagttgtcagcccgattaacaaggaagtaaagatctttgatatccaatagagatgtagttgcctaagaattaatttctcaaaagaactttggaaataaatggttgttttaaactgatctgtgatttttaaataatcttttctgaaagaatttgatgtttattttaaatacgtgaatatatgttttaaccgttttttaaggttttacattttgttacattcaaaacttaagatgtttgactctaaaattgtgattcatgtcatttaaactcttgaataaacctatttataagaataaaagcgttttaaatagttaaaaaaaaa

SEQ ID NO: 679 - DNA, 592 bp, Rattus norvegicus
caggcaagagcacaactttattttcacctctaaaagtaaaccacaattgataacaacaaaggagactgtgcagttcaactttttattttaataaaaccagaatatgcagagcacatgcggtgctagcatctaaactaatacaataagcaagtactaaagctacagtgacttgagggtcaatctttacgttcagcaagtttaaacccattcttaactttgaaacataactgaaaacattgcttgctgataagacttgctccaatgctatcgctgaatgtccaagtcactgaatatgccaatacaacaaagataaccacatgtttgaggattgcaatgtgccagacattcactgaaaaaaaatacaactaaacaaaactcacacaacaaacatctgagaatctggacactttgtatcagtgtttttgaagtgtttcattaatatcttaagacaagtgtatcaaaaccttggcatgatttagtttcaagtcgccaattttgtttttactaacatcagaaagttatggctacaccgccaatgccgggtctgcttaatttgacttaagagtttattatggcttaacattaaaagctc

SEQ ID NO: 680 - DNA, 531 bp, Rattus norvegicus
gaagtagcgatctctaggtaacacaggatcagcggcgcagacagagcttctgattattcccaaaatgtattgcaaccacagcaaacaaacaacaataacaaagcccaaaccacacaagagcaaatttaatctgcttgcacttttatgttcctttttattgtgggtatgtatgtgtctcaggctccagtggcagtgtctgcctagcatgaagttctgagcttgacattcagaactacataagccaggaatggtgggtggcacacagtggtaatcctggcattctgatgaggcaggagggtcaagattttaaggttgtggcctgtagtagttaagaacttgttctttcacatgacccaagttaaatccccagcacctttggagaggaaggaggatctcacaactgcctgcaactctagttccaggagatccagcggctctagcaaccaagggatcttgcaccaccaccattagcctccttcacaaaacatgtagtggccctgaaaaggacctttaaggatgatccggatgttt

SEQ ID NO: 681 - DNA, 433 bp, Rattus norvegicus
cagggctaaggacctttattgagcacacggcccctgatggtgctgacggagaaaccttaggctttccttcccagcagcctccgccacagttcttggctgagtagtgcctgctccctccgggcgccctgcagcacactcctgttctcctgggctcttcggatcaggtaggatatcacctcttccaggcagccataggggatagacttatataccatgtatccagcttgccctaatgccagggagacgtggtcacacatgcccagaagttgtccgaagcagacaggcccatccagaggaatgcccagctcccacatgctgcagaaagggtcacattgtcaatccagagagtggctacagcgcctcgttgcctggcgaatggattcttcattgtgggaagccacatgaggtggcaccggggaccgtggttggacac

SEQ ID NO: 682 - DNA, 382 bp, Rattus norvegicus
ttttttaagatttatttatttattatatataagtacactgtagctgtcttcatacacaccaaaagaggacattaaatttcattacagatggttttgagccaccatgtggttactgggatttgaactcaggacctctggaagaatagccagtgctcttaaccactgagccatctctccaacccataataaatctttttttaaatttttaaatcttgctgaccatggtcacctccgtgggagtttttcctacagtgcaatctcagcaggaagttttggtggtagtgggctttttgtttgtttttacttatatgtctgtctgtctgtgttctctgtcacaaaggtgtccttggaggccagcagacagtgttggatcccctggaac

SEQ ID NO: 683 - DNA, 459 bp, Rattus norvegicus
  misc_feature (1)..(459): n = a or c or g or t
cacaaaaagcagctggaaatcagaaaggcagctgccgctccagggtctcaaatccattaaaaccactacagaacaattaaaacaatccgagagaaaagggaaaggaaacaatgtccaacatttggcatttggttttatccacaggttttcccagagctcctcttggaattgaaagcaaactatattggcaaacacagcttctcagtacacaggaaggggcctcagcacctcctgccaacagaggcgctctgtgcagtcagactgtggggcacacagcagggtctctcatgctctggcctctttcatcccaccaccccttccaggacattaagcagcctacttacaggggtccccccacttggctgccatttcttcctagtaaggtggcctctgcatgcataatatattgggcaaactgtaggggacccaaagcagatactgagctggagtcncttcatc

SEQ ID NO: 684 - DNA, 587 bp, Rattus norvegicus
agggtttgctgaaaatggcggtatataggctgaattatcgagaaggggtaaggtagaacggggtttatcgattatagaacaggctcctctaaatggatataaagtaccgccaagtcctttgagttttaagctgtagctagtagttctctggcaaataattttgtaggtttaattattaaggtttagggctaagcatagtggggtatctaatcccagtttgggtcttagctatcgtgcattatataaatgattagaattactttcgttattgggcttaagtcctaacaatgaattttcacatataacttggattttaattctattatgacatttatagttggcacgttttacgccgaaaataattagtttgggttaatcgtatgaccgcggtggctggcacgaaatttaccaaccctgacaggtatagcttagtcaaactttcgttcagtgcctaatatttatcactgctgagtcccgtgggggtgtggctaagcaaggcgtcttgagctatattatgtgcttgatgccctctccttaagttttacgcaaatgtttaagggattttacaccggtttatggatgtttgc

SEQ ID NO: 685 - DNA, 2176 bp, Rattus norvegicus
ctttccgtcccaagcaccgagcggagcgcagcacccccgcgccggcggtatggcgctgtcctggaggagctggctggccaacgaaggggttaaacacctctgtctgcttgtttggctgtccctaaatgtcctgcttttctggaaaaccttcctgctgtacaaccaagggccagaatactactacatccaccagatgttgggcctaggattgtgtttgagcagagcttctgcatctgtcctgaacctcaactgcagcctgatccttttacccatgtgccgcacagtcctggcttaccttcgcggatcacagaaggtccctagcaggagaacaagaagattgttggacaaaagcaagactctacatatcacctgtggcataactatttgtattttctcaggtgtgcatgtagctgcccacttggtgaacgccctgaacttctcagtgaactatagtgaacatttccttgcactgaatgcagcaagataccagaatgaggatcccagaaagcttctcttcacaactgttccgggcctgacaggtgtctgcatggtggtggtattgttcctcatggttacagcttctacctatgcaataagagtttctaattatgatatcttctggtatactcacaacctcttctttgtcttctacatgctgctgctgctgcatgtttcgggtggcttgttgaagtatcaaaccaatttagacactcaccctcctggctgtatcagtcttaaccggaccccatctcagaatatgtccatagcagactacgtctcagaacattttcatggatctttgcctggagggttttcaaaattagaagatcattaccagaaaacactggtgaagatttgcctggaagaacccaagttccaagctcatttcccacagacctggatttggatttctggacctttgtgcctatactgtgctgagagactttaccgatgcatccggagcaacaaacctgtcaccattatctcagtaatcaatcatccctcagatgtcatggaactccgtatgatcaaagaaaactttaaagcaagacctggccagtatattattctacattgtcccagtgtatcagcattagaaaaccacccatttactctcacaatgtgtcctactgaaaccaaagcaacatttggtgtccactttaaagtagtaggagactggacagaaagattccgagatttactactgcctccatcaagccaagattctgagattctgcccttcattcaatctagaaactaccccaagttatacattgatggcccatttggaagtccatttgaggagtcactgaactatgaagttagtctgtgtgtggctggaggcattggggtcactccgtttgcatcgatactaaacactctactggatgactggaaaccatacaagctaagaagactgtattttatctgggtctgcagagacatccaatcattccagtggtttgcagacttgctctatgtgctgcataacaagttttggcaagaaaacagacctgactttgtgaacatccagctgtacctcagtcaaacagatgggatacagaagataattggagaaaaataccacacattgaattctagactttttattgggcgtcctcggtggaagcttttatttgatgaaatagcaaaatgtaacagagggaaaacagttggagttttctgctgtggacccagttctatttccaagactcttcataatttgagtaaccggaacaactcatatgggacaaaatttgaatacaataaagaatctttcagctaaaaccttaggagactactgggactctaaagaaggaacaagtgcaatttctaagacttagagactcggctgaatcagacagctatgctatgccaaagaatatcaaagttttgctatttatgattatttaaaatgagaattcaaaaagtgtggcaaaaatgacatggttaatctgcaagccaaaggggccctgaagaatatttgatgtggtgattcacatattgatgggcaaattaaaagaatgctgttagatgcacactgttgatttttatgggaaattcaagaactctctaatgaggagctgaactcactcactctgaagctgatagccacagccctctttaaattgttttcagtcgaacaggttcaaagattgaacaaaattaaaaattc

SEQ ID NO: 686 - DNA, 1073 bp, Rattus norvegicus
gaggtatctgggcgctgtaaggttgtccgtagaaccctctcgcggtcagagggggccgaggagtgaggtgcatgccccacctccccattccacccctccccaggagccctagtccgtgtgctgaggagagactggcgggagagtagggcgttctctgcggagagccccgcgcctcacttccggtggtgcattgacactcttggaacccgcaggcatgccggcacctgtgaatgagacatttttgttaccgcagcagcggtgctgagcgaggagctttgaaaaattaaatagtgctccctagaagcatcaagaaggagaatgtctgtgacactgcatacagatgtgggagatatcaagatagaagtcttctgtgagagaacacccaaaacctgtgagaatttcttggctctgtgtgccagtaattactacaatggctgtgtgttccatagaaatatcaagggcttcatggttcaaacaggagatccaacaggtactggaagaggaggcagcagtatctggggcaagaagtttgaggatgaatacagtgaatatctgaagcacaatgttcgaggtgttgtatctatggctaataatggcccaaacaccaacggatctcagttcttcatcacctatggcaagcagccacacttggacatgaaatatacagtgttcggaaaggtaatagatggtctggagactttggatgaattggagaagttaccagtaaatgagaagacttacagacctcttaatgatgtgcacattaaggacataactattcatgccaacccgtttgctcagtagctgtaataggcctggccacacactggcaaacacttaactgggaaacgcccagtgtggtttatccagttctgagtccatcagagactggtccttctgctggcatctacagtactgggctccatgcgggagccctggggttcacgccccatcttgaacatattctgtgccacggctgtcgctcaataggtttactttaaatagagagcagtgccttgtttttattaaaaaaaaaaaaaaaaaaaaaaaaaaaaaaaaaaaaaaaaaaaaaa

SEQ ID NO: 687 - DNA, 1522 bp, Rattus norvegicus
ggttgctaagacactcttgctcggtccttgacaaccctggcgggggtgctctggcagcagcctcggccccggcccccgcgggagcagcaccccttggggaaagacattttctgctcccgccaagttggcacagcctgtttcccgagccctgtgttgggcgctgtgattgctgggctcagcacctcgtgaaagccctactctcctcctgagggcacactgggaggatcatgggagaggctgaagggaagaaagaggaggctgactataagcgcctgcagaccttccccctggtcaggcactcggacatgccagaggagatgcgagtggagaccatggagctttgtgtcacagcctgtgagaaatactccaacaacaatgagagtgctgcaaagatgatcaaggagacaatggacaagaagttcggctcctcctggcacgtggtgatcggcgagggttttgggtttgagatcacccacgaggtgaagaacctcctgtacctgtacttcgggggaaccctggccgtgtgtgtgtggaagtgctcctgacccccatccctgcagttctcctgcctgtcctctgggctggggggctcccctaggcggagcctggctcttgtgaggagagttgagtcttttcttttgtccttgtgtaccagtttcctgagccacacccagagtgtgaacttggtgtcctctccactcccaggctccctgccgtctccctctgagctctgggccgtggacaggcctctccctctctctctctctctccctctctctccctccctctctctctctctctgagtgtgcatgaagggtggaatgtggcaggtgaggggcgaggaatgggactctccttggaaaggactgacccaccttccatcccagcagccccgaagtcctgccccaggactgctgggaagtgtctcctgccctcgttgttagaggccatgtggagtgagctgaaaacgaagctcctctctcgtgagacacagggcaagtctctccttgtcattgcggaaggagttccctttcccctcccccagcctgacctggggccgaacagtccaccacatcttaccggaccagcagttcacagccctggctttggcacgaggatcacccagtcttcctgtccccttctcccagcccgggccacatgaacttttcacaccacctccaccagatcagctgcatggctgagagctagggccttggtgtagagcgacttctcaaaagtgttgccgagctccggtgagacccctgggccaggagtgatctcaccgtgaggccccgttagcagggaaacctggcctgccagggacttcatcagggaccgcatgcaatttgtacttcttaccttgctggcttttctagattctttttgagtgcgggaagaagggttttagtagaagggtgaatcatattttacacagcggtcttatttatataaacatcttggtttttacaattaaaataaccaaaaactaaacttaaaaaaaaaaaaaaaaaaaaaaaaaagg

SEQ ID NO: 688 - DNA, 2288 bp, Rattus norvegicus
cggaagggttttaacgacttccgctttcccggcggtggcccttgtgtagtgagaagcgactaaaactgctggcggcatgaggggaccgggagtaggttcggggctctccggtgagcgagggttgtcagggaaggaggctggcgcggacacggaggtggcggaactgctgcccttcctggttcccggagcgcgagcagacctacaggcagccgcggcgcagcacgtgctggctctgactggtgtgggctcgggccgcacgctgttggctggacagacagcgttgttgcgggctttgatcgacctagcggtggccccgatcccagctccttcccgcgatgcctcccgtgcgctggtgaacttggctgctgatccggatctgcactggcagatgctggcggcggacccggagctgcctgtccgcctgctgcgctgcgtgttggaccctcagtggccctgggctgaagagttggctgcagtgctggccaacctgagtcgcgagccggctccgtgtgctgtgttaacggagaagctggtggccgctgagcccgagcgactgggtctggagcggcttgtcagcgcgctgtgcatgcccagttacaacgcgtccgcacccctgcattacctggggccgttgctctccaaccttagccagcaggcggaggtgcgtgcttttctcctggacccggacaggtgtgtggtccaacggctattgccacttacccagtacacagactcctcggtgcgcaggggcggggtggtgggaacacttcggaattgctgtttcgaacatcgacaccacaagtggttactcgggccccaagtcgacattctccccttcttgctactgcccttggctgggcctgaagagttttccgaggaagagatggaggagctgcccgttgacctgcagtacctatcaccggacaagcagcgagagccggatgctgacatccgaaagatgcttatcgaagccatcatgctgctgacagccaccgcacctggtcggaagcaggtacgggatcagggtgcttacttgatccttcgagagttatatgcctgggagtcagagcctgatgtgcgaatggcttgtgagaagcttatccaggtgcttattggggatgagccagaggttggcatggaaaacctgctggaggtgcaggtacctgaagatgtggaacgacagctccaagagctagaccagcaagaacagcaagagcttgctcaagagcgaagagacaagggtgccccacggacctgaagcccctttggcccacctttgccagggttcccacagggttctagggtaaatgcccagtaagtgttgagaagctcgaggataatacagcccaatcccgtgccctgttgcaaccagcactaatgtgtgctgttcagagctgcactctggaggtggagccagccaggtcctgtatcacagctgcctacagatgaggcaggatgcccatcgtcactggaactatgaggagcctgttcccagactgataggactggactgaaaacactgcgagccctgggaagccaactagtttttcattcctgcaggcactgaagggtctagacgtggttaggcttagagatataaacagtgctgtgagcagtcctttggagtccttttgctctccttgcccaagaccttgaaagcagactacactcggatcccagggtcttcctagaatgctctgcccttctaggcctgtctttggatcgcttgctgggtatcgttgcccattctatctcttatttctctgcttcatctgtcagcctcctcagtctcaggctgaattgggactcagcccttcaaatagaacctactcctcggttaacctcttcaagcctcagttgcctttcaagacatccaaaccctcctgttggacacatctctgcagagattctcctgcatgttcttccagcattcatgatcctaccctcaacatctggagcctactccgtgtatgcaccctgtctttctaattctgtagataccatgccctactgcatccccttttctgagccacagatctgctccacctgtgtgtgctgttttcctcaggaagaggtccttccaggtccccgacacctgtagtcttcatgggagtttgcagtgttccagcttcagaggaaggctggtgtagtgttatcattgcatggctaggtgttttcattgaataccaggagtcttctcccctctcccccaatgatgctctccagaactcttgttaaagctttgacgctattgacacacaaaaaaaaaaaaaaaaaaaaaaaaaaaa

SEQ ID NO: 689 - DNA, 454 bp, Rattus norvegicus
gaaaggacagcctggctttaatcaagtctcagaaagcctggtttcagcagatgcgccaaccaggtgtcaaacagtccagccttctgccttctgcagcagggctaggttacttggtccagctgactttggggatgtcatagtgctcggtgagtgtgtccaggtgtcggttgaagtcctccactctctgtttgtgggtttttgatgccttcttcaggattctttccatttgccgcttctcctgcatcttttcgaaggccgcctgcgccggcgtgcgcttgtccaggcagcgcctcttctcctcctcgttcttcttgctcgtccccatggcctccagcatcttggccttgtctttgtccttcttcttcttcttccgcttcgtcacgccgagctccgccacgcctttcagcttcagggggcccttctggacctgctcgtatgcctccatatccctcac

SEQ ID NO: 690 - DNA, 541 bp, Rattus norvegicus
gaacaagatcatttaatagtgaccctctgctgtccacttcggtgcctaggccacccactgcacccaagaggatgctgggccgtaggaaaggccgctggacatcagtctccaaactaccaacagcagttcacagagctgggatggcagtgccctccctcagggaagcaggcctgctcgcatctggaaggccaggccgtcccctcgggtggcttgctgaggaaagaaacaggttggaagcatgagaaactaagtgtagacacaatgagggcagagcataggcagagtggtaccaccaaccttgttgatctctctgtgtcgttctttggttacgatctcctctaaaacctcaccgtctcccttgatgagccttgtacggccggtctctgggtccaccacctttcgaataacgctctgtcgagcgtcccactcctcctttgtcatgggcttcatggcctggatacgagacttctgctcgtctgtcaggactgggccatcattgtcctccccagctgatctgtgccactgatccagagaggggccg

SEQ ID NO: 691 - DNA, 589 bp, Rattus norvegicus
gcgaagccacggcccaactttatttacactcattgcaaagcatgactgagggtaaaggacaggtaccaggggatggggggctgggggtcatggagactgtgcgggtgcacggtagggttgcaggagaaaaggaaggcggtggtgaggatggacagcccctctttcagtgtcccccaggctcccaggcgtccgggggcacagagcaggtgaggctgccttcaggatttggacttggacacagccagtccaatgagtccagccaggcccgccacacccagggccatgccaccaacaatggccatgcctaccagtccatctttcttcatggccttgtcaatcaggcgttccagctccttggcctggctgttctggggctcagtctgtaacagtccccgcacatacttcagagccttttcatattccttgagccggtagttgcccacggccaggtacaagacataatcccgctgctcctctttgctacctttgggcagcagctcctccagcatcacgatgcctctacggatgtcgtcattgtatttgcttcgaaccaggcaccaggcgtattcaaactgcgtgctcttggaca

SEQ ID NO: 692 - DNA, 610 bp, Rattus norvegicus
  misc_feature (1)..(610): n = a or c or g or t
gagttctaggatcaacatggtctatgacagttttgacacacaggagttgtctgcacagcagccaccactgagctctacccgaaggacctgggaggccacagtctatcatcccacagtaactgtggtgcgtggagacttcctctcagctgcaagtccttttgtatggaatacagaggagtgcttatcgaattgttcccacaggcgggagagggaaaacggaagctccagttttaaacaaaggcgagtataagagacagagccatggcaccgcataaacaccagtgttacaccgtcgtctgccatcctctggaagcctgctgggtaaagccatccattctggctgtggactcaagggcagccacgccctgggcagcactccacgccctgggcagctggaggtctgagtagttctgtctgcaggtgacatggtcgcaagcactgggcaggagcctacaaaagcacagcctgggccgcctccctgatggtggctgcagccctctgcagctcttcgtctgtctgctccacggtgaccacaaccctgatgcttggaggaggaaggcacttctcttccttgtccaagtancgtgcctgagtcaatgcgatgcccttc

SEQ ID NO: 693 - DNA, 1716 bp, Rattus norvegicus
ccagcttccgggtggagagagcgcgcgatggggcggctggtggacgtagcagagtagcggcggcgagtgggcgtgtgcgccgagcggtcgggcgcccgcgcaggagtcgcggggtctcagggagcgggtccggggcgcggagagagcttcgactgtcacccgcgtccgctcactggcatgtcggccgaggcctctggcccggcggcggctgcggccgaatgcctggagtcccctaacccctcaggtgtcgaacctggctccccctcgtacagtctgaagcccctgaccccgaacagcaagtatgtgaagctgaacgtgggcggctcgctgcactacaccacgctgcgcaccctcacggggcaggacaccatgctcaaggccatgttcagcggccgcgtggaagtgctcacagatgcgggaggttgggtgctgattgaccggagtggccgacactttggtacaattctcaactacctgcgggacgggtcagtgccactgcctgagagtaccagagaactgggggagctgctaggtgaagcccgatactacctggtacagggcctgattgaagactgtcagctggcgctgcagcaaaaaagggagaagttgtcgccactatgcctcatcccgacagtgacatcaccccgggaagagcagcagctcctggccagcacctccaagcctgtggtaaagcttctgcacaatcgcagtaacaacaagtactcctataccagcacttcagatgacaacttactgaagaacatcgagctgtttgacaaactagccctgcgctttcatgggcggctgctcttcctcaaggacgtcctgggggacgagatttgctgctggtctttctacgggcagggccgaaaaatcgccgaggtgtgctgcacctccatagtctatgctacggagaagaagcagaccaaggtggaattccctgaagctcggatcttcgaggagaccctgaacatcttaatttatgagaattcccgtggcccagatctggctctcctggaggccacagggggtgcagctggaggtggtggggcaggccgaggagatgatgaagagaacagagagcaccgtgttcgaaggattcacgtccgccgccatatcacccatgatgagcgtcctcatggccaacagattgtcttcaaggactgaccttgatcttcccctgcttttctcttgcttctgggacctagtccctctctctctttgccccggctctgctggccaagtcgtgggtcttccctctatcccctcattgcatgatatgttcagtgagccctctccagtcattgccactcactgctaaccacacggtacattccagcattaccctctggtggggctcttcagaaagccagtgtccaccctcctccacaacctcgttctgccatctttctcttaccatctggtttagaatgaggcaggattccctttcccatttgttaacacattgaacacacgtgtagaaggagacagtaccatcaaccatactccaagctgctttccgccattgcaacagagatcttcactcccctgcctcaccattctccctgcctccttaactttgtactaggctggcctggacctgtaccagctcggctatcttcatctgtttcatattatttattattttaattttctattaaattattggaataaagttgagctgaaggtctgctgctgaaaaaaaaaaaaaaaaaa

SEQ ID NO: 694 - DNA, 395 bp, Rattus norvegicus
tgcctgacattagactctcccgacatgcaagtgttgggagctcaaaggattcttgagctgggaaatcctcaagggagatgacgtatagggagccaggcgtccaaggcgtacgaacaaggtttaatgctgcacccgtcaaggcaggagctccccagatcgatgcagacttcttcctccgtgtcctccacaggactaagctgtttctgaggcctcagcgcatgctaccatcgaggcctgtggtgggggagggggctgcctaatcgtccttcttaaacttgccattgatgtacggcacccagtccaggatcagccgccagtccgtgacccacaccagtcccacggcacccacagtgccccacatgccggatgtggggatccagtttttgggcagttct

SEQ ID NO: 695 - DNA, 470 bp, Rattus norvegicus
aaaacacaagggagagacctggccagtcaacacatgactgaccacagggaaaggagtttatcaaacttcgagagtctaaaaacatacaaatgtgtcttctgtctacagcaattgtctatgctttcccacacaccgactggtaccctctgcccagtcacacacagtgaggacagcaggtcagtgactcacgtcctaagcagttttctgctgccccttctttccgatcagagacttgtggatgtgcggaatcacaccgcccccggctatggtagccttgatcagtgaatccaactcttcgtcacctcggattgcaagctgtaagtgacgtggggtgatgcgctttactttgagatctttagaagcattacctgccaactccaacacctcagctgtgaggtactccagaattgcagcactgtacacagcagcagtggcgcccacccgtccatggcttgtggtgcgagtcttca

SEQ ID NO: 696 - DNA, 1644 bp, Rattus norvegicus
cccagcagttctcggcggagccgccggcgccattgcctcctcgctcggtgagcgccgctccgctcgcccagcccggcctccgccggccgtcggcaccatgggccaatgcggcatcacctcctctaagaccgtgctggtcttcctcaacctcatcttctggggggcggctggcatcctctgctacgtgggagcctatgtcttcatcacttacgacgactatgaccacttctttgaggatgtgtacacgctcttccctgccgtggtgatcatggctgtaggggccttgctcttcatcatcggcctgatcggctgctgtgctacaatccgggagagccgctgtgggctggccacgtttgtcttcatcctgctcttggttttcgtcacagaagtagtagttgtggttttgggatatgtgtacagagcaaaggtggagaatgaggttgatcgtagcattcagaaagtgtataagacctataacgggaccaactctgatgctgccagccgtgctattgactatgtgcagagacagttgcactgctgtggaattcataactattcagactgggaaaatacagattggttcaaagagacaaaaaaccagagtgttcctcttagctgctgcagagagactgccagaagctgtaatggcagcctggccaacccctccgacctctatgccgagggctgcgaggctcttgttgtgaagaagctacaagaaatcctgatgcatgttatctgggcagctttggcctttgcagctattcagctgctgggcatgctgtgtgcatgcatcgtgctgtgcagacggagtagagaccctgcctatgagctcctcatcactggtgggacctacgcatagcggacagtgtgagcctgagctaatttgtagtgtccttgttctgatttggaaggtggattgagcaggcctgcagcagctggttcctgagttcatctagtcaaagcacacgtacactggtgttggacagcaggttggcatttcatgtacccaccttcttacctacccatctatggctttcttacccttgttctagatggttctccatgcccttaatctcagaaccatttacaagttttgtagtatggtagagctaaaggagggtgtagcctgcttcttcacctctgaggagtaatgggactgtgttgtggtatcactgggctctttttgtcctcataatgagaactcttggccaaaggtttgggggtaagagggaggacgccagctgtctggtgccgctcaccagtgtccttttaaagaatatatactgtagtacaataacatagcaattgtacaaaatggctaacatagattttagaatcaaacagtatgtgtccttgttcatcttcagaatcagagactgatctttgaaactagtggtttttaatcaaagctggctttataggaagactataatgtatgcactgttttaaagcagttagtgtgagtgtgtgcgtttctgtgtgattgaacccattcatcataagtcttacactcgttagagataatgtacccatggagactagcaaaatagtatgtagatgtgatctcaattgtaaatagaaaaatttaattcaataaactctgtatcagtcctcaaaaaaaaaaaaaaaaaaaaaaaaaaaaaa

SEQ ID NO: 697 - DNA, 547 bp, Rattus norvegicus
gacacagacacaaaggcagctgtggtaatggggtgggggacacaaaagcaaaaatcacacttcctacatggaggcctcaattagacaagagagaggctgggtccctcccctcacactccttctgacagtggctggagtaacagctctctctaatccaagctcagaagcagcaggtgacccccacctagcctcaaaggtccccactttggctccagaagcccctgtccttttaaccagcccagtaattcccctacccgagctccttctcccccaccagtgtaaacagagtttggggctgaacaacagagctctgggaaggcaggagcctcctagatagcaaagggaatgtgcttggagtttcacttcggtcccagaatgagacccagcagtgtctcccagaactcgggctgatccagtatactgcctcttcattctccaccactgacagagataggccaggccccagaccacagtaaaaacaattgatccccagaggttagagctactccctacccccgacccctggcacatacacagatttttggca

SEQ ID NO: 698 - DNA, 502 bp, Rattus norvegicus
cagactgcaaaacccatttaatcggaattttaaaagggggtgtacatctttgttccagcactttgaagcaggtagatctctgagttcaaggccagcctggtctacagagtgtgtgccaggacacccacggctatgtagatttaccctgcgggggggcgggggggagcatcccatagccttgttccatgccaactcgagtttgtggaaagtcactctactgtcaggtcctatggggatcgcaggtccaagtctctacccacagggtcatggtgacttggggtacagggttccttcctgtaccctcaatcctcaggagctgcaggtggtatggtagcttcctgggttctgccaggcctgctcattccctcctcctcgtaaacagagtgaagcttgttgatcaggaagatcttgtcctccccctcattccggatctgttccttgagcaggcagatgaccttcctttgtcctttcaccacctggatgttgaggtagacctcgtgcc

SEQ ID NO: 699 - DNA, 1744 bp, Rattus norvegicus
ggcggcggctcgggcagaatgcgggtgatcagcatggctcgactagtgctcggtctggtgagctgtaccttctttctagcggtcagtgctctctattcctccagtgatgatgtcatcgagttaacgccatcaaatttcaacagagaagttattcagagtgatagtctgtggcttgtagaattttatgcaccatggtgtggtcattgccaaaggttaacaccagagtggaagaaagcagcaagtgcactgaaagatgttgttaaagtcggtgcagtcaatgcagataaacatcagtccctgggaggtcagtatggtgtccagggatttcctaccatcaagatatttggagctaacaaaaacaaaccagaagattaccagggtggcagaactggagaagccattgtagatgccgccctcagtgctttgcgccagcttgtgaaggatcgccttggtgggcgaagtggcgggtacagttctggaaagcagggcagaggtgatagttcaagtaagaaggacgtggtcgagctgacggatgacacctttgataagaatgtccttgacagtgaagacgtttggatggttgagttttatgctccatggtgtggacactgcaaaaacttggagccagaatgggctgctgcagccacagaggtaaaggagcaaacgaagggaaaggtgaaattggcagccgtagatgccaccgtgaatcaggttctggccagccggtatgggattaaaggattccctacaatcaagatatttcagaaaggcgagtctcctgtggactatgatggtggacggacgagatctgacatagtgtcaagggccctggatttgttctctgataatgcgccacccccagagctgctcgagataatcaacgaagacatagccaagaagacatgcgaggaacaccagctctgtgtggtggccgtgctgcctcacatcctggacaccggagctacaggtagaaactcttacttggaagttcttctgaaactggctgacaagtacaagaagaaaatgtgggggtggctgtggacggaagctggagcccagtatgagctggagaacgcactagggatcggagggtttgggtaccctgccatggcagccatcaatgcccgcaagatgaagtttgctcttctcaaaggctctttcagtgaacaaggcatcaatgagtttctcagggaactgtctttcgggcgtggctccacagcacccgtagggggtggttccttccctaacatcactcccagggagccctgggatggcaaggatggcgagcttcctgtggaggacgacattgacctcagtgatgtggagctcgatgacctagagaaggacgagttgtgagggccacagcccggccttcaaatgtctttccttgggaatgagcagttttccagcaggaagttcttccggtcagctgtctgcactggcctttccgagcagtactcgccggccactggaaactgccaacagtgaacctcagcgtctcaagaaaacactgaagaattctatgaattgtagcagtgaattggattgtattctctggcatattttgaagaaaattgggctattgaaacatttttccctcctgactgctgcttgaatgttcttggaagctgtttcgtatgtatagggtttttaaaatgtgattcctttgtttgaatattaatggctttttccattaaagaataaaatgatattttggacaaaaaaaaaaaaaaaaaaaaaaaaa

SEQ ID NO: 700 - DNA, 112 bp, Rattus norvegicus
ggaaacaaaaagtttttatttaaggcaaaaacatatcagccccattattagaaaaattatccttattggaaaaaatggccaagggccaaatctaggtattaattctttaaaa

SEQ ID NO: 701 - DNA, 552 bp, Rattus norvegicus
atggagaacggagcggtgtacagtcccaccacggaggcggccccgggcgctggcaggggcgctcgcagcggcctggccgcctacttcttcctgggccggctcccatggtatcggcgcatcctcaagggcttgcagctgctgctgtctctcctggccttcatctgtgaagaggttgtgtccgagtgtgggctgtgtggaggcctgtacttctttgagtttgtgagctgcagtgcctttctcctgagccttctcctgctgatcgtgtactgcacagcagtgtacgacagagtggatactggaaaagtcaagtcatcggatttttacatcaccctgggcacagggtgtgtgtttctgctggcttctatcatcttcgtctctacccattccgggacctcggctgagattgctgcaattgtgtttggcttcctaggaagctcaatgtttctactggacttcgtcgtcatgctgtgtgagaagctgcgggagagccctcttagaaagcccgagaacaacgctagagctgaagccctcactgaaccactgaatgcttaa

SEQ ID NO: 702 - DNA, 424 bp, Rattus norvegicus
gaatgctaaggaaagttttaattgtgcatatgtattacataatatttcgggtacaaatggcaggccatcaacgtcgccatcgaaacatgtgggatgggaatatttttcttaaagtttggaaaagatgctacaaggggtccataaatctgccttcttatgcatctacgtgggaattcacatgtgctatgatgtgggcttgttttatcagtcttctgtattcatctaacaagtcggccttgaactccctatgtagacaaggatggtcttgaactcctcattctactgccttcacccccgagtgctagaattacagacaccatgtccagccactcatgcaaacaaaaatatgtagattggataatttccttccccttcagtcaatgctgctggagttgtgggggggccgggggaagaacacccgatg

SEQ ID NO: 703 - DNA, 512 bp, Rattus norvegicus
  misc_feature (1)..(512): n = a or c or g or t
attagccaaagcacatactttattagctcctgaactctagttctccttctcctgtacagttttggttccacgtagccgtccagtccggcgagcagcaatgagacccactttgcgcccagctggggcatctcttcggatagtggaaggcttgccaatgtgctggtggttaccaccgccaaagggatgctccacaggattcatggcaacaccccgcacacgtggccagcagttcctctttgccttgtacttatggtaggcacggccagcctttaagataggcttgtcaattctgcccccgccagccacgacaccaacaacagctcggttagcagaggaaatgaccttcttggaccctgaaggcagcttcactcgggtcttcttggtctctgggttgtgggagatgactgtagcatagttcccggaggctcgtgccagcttgcccctgtcnccaggcttctcctccagacaacacacgatagtaccctcaggcatggtgcccacgggcaaaacat

SEQ ID NO: 704 - DNA, 507 bp, Rattus norvegicus
  misc_feature (1)..(507): n = a or c or g or t
catatctatgaaactatgaaactttatttcttcactcagaggtgcccataggagagggtagtcaaagggatgaattaaaattttttaaagatttatttattttatttatatgagtacactgtagctgtcttcagacacaccagaagagggcatcagacctcattacagatggttgtgagccactatgtggttgctgggaattgcagtcaggacctctgggagagcagtcagtgctcttaaccgctgagccatctctccagccccgaactaaattgttataatgcccagaacctgtccagtcctgagcagactttaggaactccgagcaggctgagcaaagctcactggttggagacctctaccctgaccccaccaccccgctcacgactgctcatcactngaacgggaggaacatctttgcccttgcacctcnccttctggaggacagcaacaagactgcatcaatttccaggaggggtatccctgtcacagaagcaagagatgggt

SEQ ID NO: 705 - DNA, 1810 bp, Rattus norvegicus
  misc_feature (1)..(1801): n = a or c or g or t
gcggccgaggtacctgagacctcttctgctccagacgcgtccgcggccaggatgaagaggccgaagttaaagaaagcaagtaaacgtatgacctgtcataagcggtataaaatccagaaaaaggttcgagaacatcatcgaaaattaaggaaggaagctaaaaagcggggtcacaagaagcctaagaaggacccaggagttccaaatagtgctccctttaaagaggctcttcttcgtgaagctgagctaaggaaacagcagcttgaagaactaaaacagcagcagaaacttgacaggcaaaaagaacaagaacgaaaaagaaaacttgaaattagccctgatgatgagcaatctaatgtggaaactcaggaggaatctgatgagcccaaaataaagaaagctaaatcaggcaaacagaatccaaagaagttacattgtcaggaacttaaaaaggtgattgaagcctcagacattgtgttagaagttttggatgccagagatcctcttggttgcaggtgtcctcaagtagaagaagctgttatccaaagtggatgtaaaaaactagtacttgtattaaataagtcagatctagtaccaaaagagaatctagagaactggctaacttacttgaataaggaattgccaacagtggtgttcaaagcctcaacaaacttaaagaacagaaagaagacattcaagataaagaagaaagttgttccattccaaagtaaactctgctgtggcaaggaagcactgtggaagctccttggaggttttcagcagtcctgtggaaaaggagttcaggttggagtggttggtttcccaaatgtgggaaaaagcagcatcattaatagtttaaaacaagaaaggatttgcagtgttggagtttccatgggacttacaaggagtatgcagattgtccctttagacaaacagatcacaatcatagatagtccgtgcttcattatctcaccttgtaactcccctgctgcacttgccctccgaagtccagcaagtattgaagttctaagaccattggaggctgccagtgccatcctgtctcaggctgatagtcaacaggtggtgttaaaatatactgtcccggggtataaggattctctggatttttttactaaacttgctcagagaagaggtctgcaccaaaaaggtggaagcccaaatgtcgaaagtgctgctaagctgctatggtctgagtggacaggtgcctcattaggttactactgccatccccctgcatcctggaatcattctcctcattttaatgagaatattacagcaatcatgaagaggggctttaatctagaagaactagaaaagaataatgcacacagcatacaagtcctcaagggccctcatttaactaataaaatccttttccggtcttcgggcctgacaaatggaatactagaagaaaaggacatccccgaagagtcaccaaaacagacagaagaccaacaggatggtgatgatcaagaacatgttactggtgaaaaaaatgcagagatctcagatgtgactcctgtagaagagaccagggagatgtcacctgggcaatcaacagcaagtaaaccatctgacagatcctttatcttggataaaatgagtgaagaagacgatgcctatgactttaccacagattatatatagccttctaaatgttcaagtgtgctctgtacagtgtttntagattgctttggtatgatataaagtgtaaatcttgtgaatatgtatcatgttttaaattaaaaacaaaataaaaagtgtttgtataaaaaaaaaaaaaaaaaaa

SEQ ID NO: 706 - DNA, 462 bp, Rattus norvegicus
aaacaaaatatcaaaaagtttaagaacaaagtattgcttggtttttgtttgaagatgagattctctctggcttgtttgatcaacattcaccacagctgcagaaaattaaattgaatctttagaaggtatcgcatatggacctggctggggctataaacaataaactcattgtagttgagggtgtacccctctggattgagaattcctgtgtcacttgctggtcctaagggcactgtactcccattcagggtgatgaagtgggcagggctgggagccatctttcccatccccttggtgctatgcttgccctgaagcaatccttctgccttagggttggcctccagcagttcattacactgacccagagctacctctgacagaagaagcaatcctgtattcttcaggcgagaagcatagcagtaattggcactcttggacgacatgtcagcaaagtacatcctt

SEQ ID NO: 707 - DNA, 478 bp, Rattus norvegicus
  misc_feature (1)..(478): n = a or c or g or t
accataaatactttatttcaactagaaggtacaatctcccaagggtttcaaagttaaaaagctacaatcacatcatgttgaaatgacatttagaaaaccacaatgctgttaatggacggctccgctttgaccacgtacacttctgcacagcccttatggactctgcacaaagaaatcacttctctcccttctcctcttaattgttcttgtatgtaagttgctttctattccagtatatccagagtggcgagataaccaggccagccacgtagccaaaggtcgctccgagtgtacaggagatgggccacaccttaggagtttttatttaatcccctctcctctgctgtgtgacggctcaccctggcaacctgtaagctcttgcngtccctgccatggtctttcccaatccagtggaatangaaatgctccaagccatgctcctatgaaactagaaactgtagtaatctgaagactgttc

SEQ ID NO: 708 - DNA, 421 bp, Rattus norvegicus
catgctcgcccttttaataggaaaaggtgggctggccctgtaaaagggcctttggttttgtgagatcagacgacagacgagagtcccttaaccgccaaagccgtagagggtgcggccctgccgtttgagcgcgtagaccacatccatggcagtgacggtcttgcgcttggcgtgctccgtgtaggtgaccgcgtcgcggatcacgttctccaggaacaccttcagcacaccgcgggtctcctcgtagatgagaccggagatgcgcttcactcctccgcgccgggccaggcggcggatggcgggcttagtgatgccctggatgttgtcgcgcagaactttgcgatgacgcttagcgccgcctttgcccaggcccttaccgcctttaccacgtccagacatctctacaaagctggagagcagc

SEQ ID NO: 709 - DNA, 1223 bp, Rattus norvegicus
ggggagccggcagctggtccagcttccagtcaccatgaaggctctcctagttctggggttcctcctgctctctgcctctgtccaggccaagatctatgaacgctgtgagttcgccagaactctgaaaaggaatgggatgtctggctactatggagtcagcctggcagactgggtgtgtttagctcagcatgagagcaattataacacacaagccagaaactacaaccctggagaccaaagcaccgactatgggatatttcagatcaatagccgatactggtgtaatgacggcaaaaccccaagagcaaagaacgcctgtgggataccctgcagcgctctgctgcaggatgacatcactcaagccatacaatgtgcgaagagagttgtgagggatccccaaggcattcgagcatgggtggcatggcaaagacactgtaaaaaccgagatctatccgggtatattcggaactgcggagtctgaccgccgtgcacttctactcagctcacactgtctctttctcactgtgggagtagctatgggaaaggtcacacttccttgctttcccctcaaaccaacagggctttcacttctcagtctcccaacgcactgcacactgctcccagcatcccgcacagtctcaccacacacatctctgcacatcaggaagtaatgcacagtaggctccatcgggatccatcttcatcagccctgtgccggatacaaacagcacatatttacaggagacgagttgatcttggggaatggcagttgtgtgagtgccagggctttgtataggctcagcacccagttagaacagcctctgtggtggacctggagggcttttgagggcccaggactcagtggatgagaactgagactgcctgaactcagaaacttatgaaacgtgtgagctttcaaaacagtatcttcttagagctggcctgtttatcctgccttcaaaataaattctcagcccgtatgcccgtctgttttaacccttgagaggatgttcccagtcttgtgaggtgctcagggggaccagtgagctgtgcttgtccatatctttcttaagtagcttcatgcacactaaccaactctgagacagatgagcttgtaacaccagacaataatcactagaacagatctaatctgatagagaaaaagtataattctcattaaatgattttcaacgcaaaaaaaaaaaaaaaaaaaaaaaaaaaaa

SEQ ID NO: 710 - DNA, 662 bp, Rattus norvegicus
aagtgggaaagtcagctttatttataaaagtggtcgggtacagaggacgccatcccacccctctaaatgactgtaacagacattcacatgatactcacatagtttaactcttcctatataaaactgaacaacagtattataggatgaggaaagaaccccacaaggtttgcctaagacatcaaaacaaacaaaccgaagctgcctagcattaatgatctactgacaacagaatgagaaactaaggctcatacctatggcatgctactgcaccaaggaatgcctggagaggccaatgctccacaatgaacagccatttgagcaggttggtttgtgactctggctgatttcgccaactaacagttataccgattttataaacaaatccttgtgaaacagggaagacttgctaccaaggagaatatgttaacagtcctgcctcactgttcaggtcaactagtaaacaacggcataaaaagaacttaaaacctcagctcccaaacaactggtttacagaattagaactctctctgaaatcagggtactgccccgtagttacttataaagttcttcatagtagaaatgatatattctagttaaccaaagagttcaaaataaattacccaaataacaatttgtcagttagctgtaactgttactttaaa

SEQ ID NO: 711 - DNA, 590 bp, Rattus norvegicus
catggagcaaacattttatttaataagttataagatacactttccagtcggcatttgttccagtttggtctccatggctactaagcctgtatccctttcgcatccagcttcagctgctctgggtcctaacgggtggcttttagcacccacacctctctggctgccgtgccttggtgcgggacacctacttcacccctaccatatccacgacaacagccacaacacccgattttgagggggaaggggtatttgacagcctggaaatgcttacaccaaagcctttaaagagaccctaggtgcatgtgttagtgccttggtccttaaggcctctcatgggtcataacaggggtgggtatccaccccttccagcttttgcaaggaggaggtcctacagtaatttatcagtggcctctgccatttagcacaagcaatggactctgggggcagctgacagaggctctgcatttggccatgaccacatgtcttcaagaaagtaggcaagagcagaatccctcctactccagagctggctttgcgatgaagtcaaagtggtcagggcgcagacatggagaacgatctgggtcagactt

SEQ ID NO: 712 - DNA, 1816 bp, Rattus norvegicus
cagagaggaacagcaacctcgcgtcacctccgcaggaccaggattcgctagatgggcggggctcgcaggcgtcaaaactggccgttggctacgtatgcagaggcggggccataggtctcaccctgccaaagcctgggggcggggcttttgaaatactgccctgctattggcttactcaggaaggcgggcctccagttgacattctctattggctttgccgaacagaggcgggacctaaaggtgtcacgccctaccattggctgcgccggacggggtctgcggcgcttctgtgttgtcattcggctgcgagtagaggacacgggcaagatggcggcggtggctggtctggtgcggggacctttgcggcaggcttccgggctgctgaagaggcgtttccaccgctcggcgcccgcggcggtgcagttgacagttcgtgaagccattaatcaaggtatggatgaagaactagaaagagatgaaaaggtttttctgcttggggaagaagttgcccagtatgatggtgcatacaaggttagcagaggcctgtggaagaaatatggtgacaagaggatcatagatactcccatatcggagatgggctttgctggaattgctgttggtgcagctatggctgggctgcggcccatctgtgaatttatgaccttcaatttctctatgcaagctattgaccaggtcataaactcagctgccaagacgtactatatgtctgctggcctccagccggtgcccatagtgttcagggggcccaacggcgcctcagcgggcgtggctgctcagcactcgcaatgcttcgctgcgtggtatgggcactgccccggtttgaaagtggtcagcccctggaattccgaggatgcgaaaggacttattaaatcggccattcgtgatgataatccagtggtgatgctagagaatgaactgatgtatggagttgcatttgaacttcccacagaagctcaatcaaaagatttcctgattcctattggaaaagccaaaattgaaaggcaagggacccacatcactgtagttgcccattcaagaccagtgggccactgcctagaagctgcagctgtattgtctaaggagggaattgaatgtgaggtaataaatctgcggaccatcagaccaatggacattgaagctatagaagccagtgtcatgaagacaaatcatctcgtaactgtggaaggaggctggccacaatttggagtaggagctgagatttgtgcgagaattatggaaggccctgcattcaacttccttgatgcgcctgctgttcgagtcactggtgctgatgtccctatgccttacgcaaagattctagaagacaactccatacctcaggtcaaagacatcatatttgcaataaagaagactttgaatatctaatctagacgttgaatgtcaagtcagtgaaatttatttaaaatacgtgttgggacttcccctgacgtgtactgggagacttactagtcaggagttaatgctgatgtggcagcaggtgtctctgtactggtaagaagtttaaatgtgcttatgagtagaatttttctactccctaccctagatgctctgctctctttgtctgttactgttaagttggtctagtctttgaataagattaatataaaaatttgccctctttcattagaaggggcaagatagaatgcccccatggaagataacttatatgtctaaataaaacatatattatctacatttgctgttaaactgttttgataaggaataaaggggattcctacctatgaaaaaaaaaaaaaaaaaaaaaaaaaaaaaa

SEQ ID NO: 713 - DNA, 900 bp, Rattus norvegicus
atggaacatttcgatgcgtcactcagtacctatttcagggcattactgggcccccgagacacacgagtcaaaggatggtttcttctggacaattacatccctacgtttgtctgctctgccatttatttactcatcgtgtggctgggaccaaaatacatgaaaaacaggcagccgttctcttgccgaggcatcctggtggtgtataatcttgggctcaccctgctgtctctctacatgttctatgagttggtgacaggtgtgtgggaaggcaaatacaacttcttctgtcagggaacacgcagcgcaggagaatcagatatgaaggttattcgtgtcctctggtggtactacttttccaaactcatagaattcatggacacctttttcttcattcttcgtaagaacaaccaccagatcacagtcctgcacgtctaccaccatgccactatgctcaacatctggtggtttgtcatgaactgggttccctgcggccattcgtacttcggtgcgacgctcaacagcttcatccacgtcctcatgtactcgtactatggcctgtcctctgtcccttccatgcgtccctacctctggtggaaaaagtacatcactcaggggcagctggtccagtttgtgctgacaatcatccagaccagctgcggggtcatctggccgtgctccttccctctcgggtggctgtacttccagatcggatacatgatttccctgattgctctcttcacaaacttctacattcagacttacaacaagaaaggggcctctcggaggaaagagcacctgaagggccaccagaacgggtctatgactgccgtcaatggacacaccaacaactttgcttccctggagaacagtgtgacgtcaaggaagcagcggaaggattga

SEQ ID NO: 714 - DNA, 1619 bp, Rattus norvegicus
gcgcacgtggaaagaaagttggtggaaggcaaaggaagtttttgagtctttcactggtgagatttctcaaatccagttatgaggctttcagccttgctggccttggcatccaaagccactctctccccccactaccgctatggaatgagccgtccaggttccatagcagacaaaaggaagaatcctccctggagcaggcggcgcccagtagtggtagagcccatctctgatgaagactggcacctattctgtggagacatggtggaaatcttagaaggcaaggatgctgggaagcagggcaaagtagtccaagttgttcggcagcggaactgggttgtcctggagggattgaacacgcattaccgctacattggcagaaccaaggatcaccgagggaccatgatccctagcgaagcccccttgcttcatcaccaagtcaagctagtggatcctgtggacaggaaacctactgagatccagtggagatttactgaggcaggagagcgtgttcgtgtctctacaagatctgggagaattatccccaaacctgaatttcctagagcagatggcattgtccctgaaacatggactgatggccccaaggacacatcagtggaagatgctttagaaagaacttacgtgccccggctaaagacattagaagaagatgtgatggaggccatggggatccaggagactcgaagattcaagaaaatctattggtattgagccttaagagtactgcttcaccctgaagtccaccctttctttctaaaacaccaataaagaagccttgggtgctgctgctgtccacacctcccctcttcctttcccaagggcttgcattttggggagcttaggcttggtgcagctcttctgcttgtcaggatagactgggtgggtgctagcctttccagggacaggtcctgtgtgtttggggatggaagcaagaagaccctctgttcttttcctatttacagaaacaggagttaagtcttaagagttttaataaataaaattacatggtatttataggaaaaggagctaagtcttaaaagttttataaataaaaattccacagtattactttccaagtgaagggaaagaaagggtacaaatctgaagtctgcaaagagccagaatcccagcaggatacagggcactctaaagggtgccaaggacggcagctagccatactgacacctggtggcttcagactgtcagctgtcttcagtctcaagaatggagaaggcctgacccaggggcgtcttggttgccaccagaaccagatttctgggagacagttcagggctgaagatgggcaacagctcagcatagaagcctaggagaaaatgtgagggctaattagaaaggaacaggagtcccacccaggctttctctgcctgtcctgtaacacagttccttattccaaagtaagaagactccagaaccactagcttgagaggcaatcaatgtgctttcccaatccctgggatgcttgcttaaaatccatctcattaggggttggggatttagctcagtggtagagcgcttgcctagcaatcacaaggccctaggttcagtcctcagctccaaaaaaaaaaaaaaaaaaaaaaaaa

SEQ ID NO: 715 - DNA, 2895 bp, Rattus norvegicus
tcgccatgtcccaccagaccggcatccaagcaagtgaagacgtcaaagagatctttgccagagccagaaatgggaaataccgacttctaaaaatatcgattgaaaatgagcaactggtggtcgggtcctgtagtccgccttcagattcctgggaacaggattacgatccctttgtcttgcccctgctggaggacaagcaaccgtgctatgtgttattcaggttagattctcagaatgcccagggatatgagtggatattcattgcatggtctccagatcattctcatgttcgtcaaaaaatgctgtatgcggcaacaagagcaactctgaaaaaagaatttggaggtggccacattaaagatgaagtgtttggaacagtaaaggaggacgtatcactacatggatatagaaagtatcttctctcccagtcttctcctgcccctctgactgcagcagaggaagaattaaggcagattaaaatcagtgaggtacaaactgacgtgagtgtggacacaaagcatcagacactacaaggagtagcatttcctatttctcgagatgccttccaggctttggaaaaactgagtaagagacagctcaactatgtgcagttggaaatagatataaaaaatgaaacaataattttggccaacacagaaaatacagaactaaaagatttgccaaagaggattcccaaggattcagcacgctaccatttctttctgtataagcattcccacgaaggagactacttagagtccatagtttttatttattcaatgcccggatacacatgcagcataagagagcggatgctgtattccagctgcaagagccctctgttagatattgtagaaagacaactgcagatggatgtgatcagaaagattgagatagacaatggggatgaactgaccgcagatttcctgtacgatgaagtccatcccaagcagcatgcacataagcagagttttgctaaaccaaagggtcctgcgggaaagagagggattagaagattgattaggggtccagcggaagcagaagccactactgattaaaattgtcttattaaatgttgcaatatagttttgtaagatttccagcttttagtacaaggagaactgaaatcattccatgttgatatagttgggaggaaaattgtactttttgaaaaatagcacttttcacttctatgtattttttaaattaatgctatagaagactcatggtttttattttttagttaaagctagacaaggtttcaacatagtaatgtttggttttgtcacactgttttcatagcgtgttgattccacactttcacataatcttcaacgaaagcgtaaggacttgctttttagaactctgtagtgagttctgtttgcctataagggaagtggaacaaccgagacactcgcacttctttcgagtgttaaggagcctgggaggagcaggcagccgcttgctttgagcatgctcaggtggggctgtccgccgctgtggggaaggcaccctgcagcagggcttcctgccccacctctccattgtagtagtgtccagatctcagaaacgcagcttgaacccagcttcaaaggtaccagatgcctcaggctttctcatggcgctggaagactgcagtcttgtaaggtctttgcagagctctcagttgacgatttccaaagggattgtgaaaagactgtgaagccagatgttcaccttcagatggagattcaagtgtcattaaagagaaacaactaaaggaagtgtctgacctttcaaggttttttggtttttctttttcttttctttttttttttgtatttttttcttctctttgaaaccatgtgtcttaaaggagattgtcatattgcttgggagcaagttttcagacctaaaattattgatttctaatacttagtaggctagcacagagaatacgtagcctaaggctcttttgtcaattaataatgcctcggaacacgggctttctgaagcttggttactttcagttaaaacctaaagagtttgagcctcaagagttcattgttacttgaaatagagggagttagaacacttggtatttaatctgctaaacctgctgcagagccataactcagaagtttggaagcggactgacgtgtccgggatttggaagaccttgacctgaacctcatgctgcctgagatggtgtcagtaacgtacatttcatggaatgaactatgaagcacccattgcagagccttattacctaaggtaatacatgcgcctttcagaaattcagtgtggactcacctagatcacagaggaattacgagctgatggaagtttttaaaaatagatttgtgtgttttgtttgtttacaaatacgtagactttactacttaaatatgcaggagagttgacagtaatgttgctcttgtttacgagaggtaaactttttagtcgtgcgtgtgtacacgtcatcacacgtgcccatagagtgctgcagcgagagacctggagctgtgacgcagaccttccagagctgccgtttcaagcagagggggtgctttgcgtcctgggtccagacccggtggggactgttctgaagcagtgtgtgcaatgatgcgctgaagcctgtcacactacagcggtcactgacattccacagagatgtgaccttgtaacctactaataatcaaaccaatgattgctgagaatcacgtatgcatttgtcttagggaataacccattgtttacagtatgttttaggtgacaatagatgtgaataacattcccaataaatttatatagcagtgaaaaatgacatgtcttctgtggacattttataagtgcattttatatcaataaaatttttctctttgagttgtgtaaaaaaaaaaaaaaaaaaaaaaa

SEQ ID NO: 716 - DNA, 1570 bp, Rattus norvegicus
ctgggggcggggcctttcctaaagggcaaggctaagaagcatcctgaatcggggctggcagagggttattaaggctggagtggaaggatgtccagggtattggggtcaggttggcattagccctgttgaagccaggctgggctgactcagcatcctgcctgctctagccaaccccaagccccgacggctcctcactcccttgggcagagatgggagatggcgccggtgctgcccgtggtgctgcccctccaaccccgtatccgtttggcacaggggacctggctcctctcctggctactggcactagccggtggcctcaccctcctctgtagtgggcacctcctggtacagctgtggcaccttggcaccttcctggctccctcttgttcattccctgccctgccccagactgccctggcggcaggagcagtggcattaggcacagggctaggaggtgcaggagccagccgggcgagcctggatgcagctcaataccctccctggcgaggggtcctgactccactgctagtggttggcactgctgcaggtggggggctgctgacccttggtctggggctagccctggccttgcctgtaagtctccaccagggactggaagagggcctgcaggctgccttggctcactacaaggatacagaggtgcctggacactgtcaggccaaacgactgatggatgaattgcagctgaggtaccattgctgtgggcgccatggctacaaggattggtttggtgttcagtgggtcagcagccgttacctggaccccaatgaccaagatgtggttgaccggatccagagcaacgtggaaggtttatatctgattgatggagtgcccttctcctgttgtaacccccactcaccccggccctgcctgcaaagccagctctcagacccctatgcccatccactcttcgatcctcggcagcccaacctaaacctgtgggcccaagggtgccacgaagtgctcgtggggcacctgcagggtttgtccggcacactgggaagtattctggctgtcaccttattgctgcaggttcttgtgctccttggtttgcggtatttgcagacagcgctggaaggccttggaggagtcattgatggggaaggagagacccagggctatcttttgcctggtgggctgaaagacatactgcaaactgcatggctacagggagggcttgcccacaagccagcacctgaggaggccccaccagatgaggaacctcccaaggaagttctagctgaggcctagaaacctgaaggggtcgtcggggtgggaaggggaaagatggacaaatatggagaactcagaatcctttactcaggctcagggaaagagtggttcctgggattacaggagttagagcaatcagagctggactgtgacaaggtccagtgtcctgaagcccagccattgcggtcaaaaccaccaaggctgagaagagatgagggtgagagggaagtgacagccaacggactgaagactctttctagtattcagactctacaataaagtttgtggacagaaaaaaaaaaaaaaaaaaaaaaaa

SEQ ID NO: 717 - DNA, 436 bp, Rattus norvegicus
ccatataataatttaatatatgccagccaaacaaagtagtttatctttattcaattaaataaaaacagacctgtcaggtatattatataacattcactatatacacatgatttaggcgatgcaaggtaattctaggtatgctaactgttcaactattagtgaaacacagaaggtgtcaggagcccagcgtgttcctgctcacattgggtgcctgcgtttctgtggacagttagagggacagccacaagccaggacagatattaccagtaaacgtctgagggacagaggggctggggatgagtctagcagagattaacagtctcctaagtgtggatagcatacttgacagttacgctttaacaagttcctcttcgatcatgttcatgacgtcaaagtttttgtttgaaggcaacaccaccacattttacctcgtgcc

SEQ ID NO: 718 - DNA, 515 bp, Rattus norvegicus
caacattaaaatagatttattaattactggtgaaaaacatgatatattataaccaagtcatatactttattgaaaagaaaaaaatattcggtaagaagtttggcacggtcttctgctgggacctgtgtgaaatcccaggacttgtaggtcggggctgccttcgtgaggggtgtcaatgcagcccaagaagtgggtaaagtaggaagtgggggtcaaagaaaggcaatcaagaggtctgctcacaggggccttttcccacgttcatgcactgtcaggctgtatcctgggacagcggggagcctcggagagttaatgagaaacagaattgtcactttggcgaccaatgtcagaaaacaggttcctggtcaagcgttaggtactagcgaattctgaccctgagacttgaggtgtcactgtctttaaactgccaggcatggagggaagtgtccaaagatgggacttatagagagaagtggtcccggcttcctgtagtctccatctcaccagccccaggc

SEQ ID NO: 719 - DNA, 476 bp, Rattus norvegicus
  misc_feature (1)..(476): n = a or c or g or t
acaaactgtggctaaggttgaacttgcaaaaaataaaatcttgaagaaaggccccttagggttaaacattttcatcttgttctcgttcttctctgggcccaagctcctctctgttccttgggaatggggccaggcagaggccacataaggaaccaggaggccttcctcattgggatggaggtttccgggttgttcagatggccccataccagttcccagatgctcagagcatgaaggcccagtcacacaggtccagcttgagtctagagctgcgtgctcacatgggataattgagccatctccactgtcttgactcaggccacaccctggactcaaccttgctttaggaacattatctgagaggtgttgatggaacaaatccctcncctcagcactttctcaggaggaaaacatggcctcctgcaagtcctgngaagtgctcaacaatgggtgtcatggaacttcagaagggccta

SEQ ID NO: 720 - DNA, 521 bp, Rattus norvegicus
caaggcagtggacaagtttattcagtcccagagtcaaagcgtcaacccctattgaacctatgtggactgtcgcacaaatgacccacaacagccatgtcaggaggcacttgggctgaggtaccttcaaggacaggaggctaacgctgacacaatggcctcctttctagcaaccctgctgcactgaggtgcaggggtagctctaccctggagagtatgtgcagatccccaggctagaagagctggctggcccttggccatggctacacagagttcctgtgcatggtctcctggctctctctgcagccagctctcaggaataacctaccaccaaatatacaaaacagatttgttccccattgcttcagcctggctccaaactgctcaagttcccacgggcacactgggaggtagaggctctgccctggaataggtaagctcagtgctccaggatgaaggctaggttctcagacatgcttccccaactcagaagcccattcgtggcttcttccggggaagatggg

SEQ ID NO: 721 - DNA, 421 bp, Rattus norvegicus
cagtaaatgcttgcatacctatatgcgcagggttatttatgtaaaaaaaaaaaacattgcttggtcccaaatgggaaaggtttaaggagccctatgctaatcacagctcagacaatccagtgccttcctgtgagagccactgtggagggaagcctacctctcttctggcacttccatgaagtaaggctttcctcttttctacctcctcctcttcctctccctcttcctctccctcctcctccttgccaggagcaatctgatgctgctgctctggacagtcactgcctgctttgcccgtgggcggagctctattcagaggcaccccgccccctccagggtgatgagcatcctgcatagcaccaggacctgccctgcctcttctcctgtgcacagagcactaactatttagcatatctacctg

SEQ ID NO: 722 - DNA, 2231 bp, Rattus norvegicus
gcttattatttgttctgaggaagctctctgtgtggatacagatttataggtattagaagagatgttctatatacagagttctgaggcactgcagattctgaagaattccctaaggaagcacctccctgagtccttaaaggtttatgggactgtcttccacatgaaccagggaaacccattcaagctcaaggctgtggtggacaagtggcctgattttaatactgttgttattcgaccacaggaacaggacatgacagatgaccttgaccactacaacaacacttacctaatttattccaaggatcccaagcactgtcaggaattccttggctcatcagacgtcattaactggaaacaacatttgcagatccaaagttcacagtcagacctgggcaaagtgatagaaaaccttggagccactaacttgggcaaggtcaagcataagcagtgctttctctatatggtatctcatacagcaaagaaactgactccttccttggtggatgcaaagcacttagtagtcagcagtgagaaacccacaccttttgaccatcagttattcaaatttgcccgcctggatgttaagcatgctgcattggtgaatagcatctggtattttggtggcaatgagaaaagccagaagttcattgaacgctgtatctttacctttcccagcgtctgtattatgggccctgaggggacccctgtgtcctgggccctgatggatcacactggagaactaagaatggcaggcaccttgcctaagtaccggcaccagaacctcatttaccatgttgcttttcaccaggtccatacactagagaagctgggctttcccatgtatttacatgtggataaggttaacctcaccattcagagaatgtctgctgtgctggggcatgtccccatgccctgtacctggaaccagtggaactgggtacctctctaaagccagaaaagagtgagagggggactgcacttgtagatggagaaatggctgagtgaacagagagaagtgaactgtcattagggtggtgtgtgtttctagagagcagggttgcatcacactgagctgcacacagtttcttcgccctcacattgctcatgctcttaattccatttctcagcatacagaaggccaccatgtcctgctcccacattctcaggattcctgtaacacatttggctaaattgtactctctcctattcattttgcaggctcattgatccatggctattagtcagtaggtttgttttgtgacctgaccccccacaaccctgcacacaggcatacttcctctggctttctgtagctttgcttttatgggttggagaagtttgttctcatgtcactcaccagacattaaattgttaatatgtaaaaactactatacatgcaaacacagatacacagtatgtgtggtacaactgtaagaattgttagaaaagagactagagctcagcaagtaaatgtgcctgcagtcaagcctggtaacctgaatttgattcctgggaaccacattgtaaaaggagagaatctattccatcgacttgtcctctaacctccccaggtatggggcgcatgtgcacacacaaataagtaaatgtaatctttaaacagttaaaaagactaactggtgatctttgagactagatttgtattttttttttcaatgaacattcactattacttcccgtgccaggaaggaacacttagcattgttctaaaggctgagcttcattacttcagtctaacgtttatatgtcataaattctttatttatggaagcttaagctctagaaagcaaagaactgtgtggagaagagaaaataacaacattaaaaacaggaaaaacggatgtctgttatgtaggagaaaggaagaagttgggatgaggaaggaggatgggaagcagaactggggtgctgaagggagaggaaaggagggtagtagagaggaggagagaagagggaaggggggggaatgggaaaagaggggaggggagagtgatatcttaggttatagagagatcagctcttctgtagagaggataaataatgtggtcgcattcatagctgagttgagcagaaagtgatcagattaaaagagaatgaaggggggctggggatttagctcagtggtagagcgcttacctaggaagcgcaaggccctgggttcggtccccagctccgaaaaaaaagaaaaaaaaaaaaaaaaaaaaaaaaaaaaa

SEQ ID NO: 723 - DNA, 465 bp, Rattus norvegicus
  misc_feature (1)..(465): n = a or c or g or t
ggtcagtgggtcagcaggccggaagggtacacccagaatttgttcctcgtttgagactcaagaaaaattgctcaggaaacatgatttcatttgtatttcttcctgaaggaaggaaatttgtaaaaatctgtaatcgtgaaacagattttttttttttaatagcaagagataatagctgattccttttcatagctgggattttactctgagagaattcggactttaattttggttattcagacagggtctcacaaggtccaagctggtctgaaactctgtaagtaggccagattggcctaggacttactgtaattctcctgcctctgctccctgagtgctaaactaccacacccggcctcaaaagatcctgttttcctgnaaggccggaggctaaggagcgtttggtgagcaaagacggcgccgcttctgtgagtccaaccctcctgagtttccattgcatgatta

SEQ ID NO: 724 - DNA, 634 bp, Rattus norvegicus
aagataatttaactccagcactaaagccaatgggtgttagttcttgacccaagagatttgttaaccatcaaagcagtatcttgtttcagttcttagagtgtatctttgtgacttcagatctagagtggagaatacctcatgtactataacttgaagttattgttctctctgtttatctctagaaaagtttttgctgataatcactacaatttaaattctaagtggaggacagtgcagtaagtaagtcaaaggaaaccttttatgatagcacacctaataaaagtttgaagactattttagtaaatttatatagctagtcaagtgatgaggataaatattaatatccaataatttttatacaagaaatcttttattagcactcataattatgcctgtcacaaagaaagtactcatacttgaattttaatttatttaaatcaaattcatcttgaatatctattattaattattaccagtcagtgatacccaacttcatttcgtagtagaatcatatgggagctttcctgaaattgagtcatgcttcagtctttccaaaacctcttccagtgagtctcactgtagttagagttcagggcaactgctctaaattagttcagtaaaggtccttttctct

SEQ ID NO: 725 - DNA, 643 bp, Rattus norvegicus
acatcagtttaatgccttctgtacagcaccagaggttaaaagtggatctgagtaagcaaatgttctttattagtcacagtttgtcatcacacatttatttctacaataaacatacaggggagaggaagacagctcaggccaaaagctttcgccttaaataaatacgcacttcacccgctccatatgaacacccaaccaagcgcccggtcctgaaggctatgcaagtcgcatggggttctctaagtttgctttgaaagtttcaagaaacttggtagctagttcatcatcaaccattcggctgtcacttgacatcgtgacagttataagctggtgctgccgcacttgggggttcccctcttcatcctcagtgagtttcagcactggacggaatcttccaactgccaagatacaggcctgaggcgggttaatcactgcagtgaactcatcgatgccaaacatgcccaagttggaaatactaaaagatcctccttggtactcctccggcaacaattttccatctcttgctttctttgacagaacctttacagcgtcagcgatctcccgtatgtccttagcagctgcatcttttatgattggtgtaattaaacctttatctgttgccacagccactgaaatgtcaaca

SEQ ID NO: 726 - DNA, 635 bp, Rattus norvegicus
ccaaagaaacatttattgaaacacagggcccatgttagaggctcctgagccccagggcgaggcccacaaggcagagaccattgctcagcagacaccccaggttgcagagggaagacaggccatggtagtagaagaatttctgccggagagcactgtacttggggtccttctcccgcagctggcggtaggggtcagggccctggaggctgcctggcacctctgtccccaggcctcgctctttctctatactctgcagggcccacatggtagctgtggtgcgagcctcgagccagcgagcattgatggtagccagtgtgagactcagaagcagtagggtaagctgactgatttcccacagcgtgaggttgatccaggcccgctgtggtgccaagatgcagaggttgatgaaggcacaacccaaggagacgtgaaaatagactgggaagagcttgctctgcacaagtccaaacgtgtgcctcgggaggctccggaaaagcaggaagcctgaggcaaaggtcacccacatctgcatgccccagacaccagacaagaccagcaagtggaccactttaatcagacttcctgggtcctcaccttcttccattctgccgcccgttggagcaccggaggtcagc

SEQ ID NO: 727 - DNA, 2005 bp, Rattus norvegicus
tcagaagcgggtgtcaccaacagcaaacgtgcgaccaactcttcggctagtgaatctctaagccgcgaagagtgctttgaagtagctttaggtggaagatgtcagaaagtaactcggcagagggtagcgacagaagcgaggagcaggtgtctggtgctaaagtcatcgcccaggccctaaaaacgcaagatgtggagtacatgttcggtgtcgtaggcatccccgtgaccgaaatcgcccttgctgcccaggaactgggcatcaagtacattgggatgaggaatgagcaagcggcttgttacgctgcctctgcggttggatacctaacgggcaggccaggagtatgcctcgttgtttctggtcccggcctcatccacgccttgggcggcatggcgaatgcaaacatgaactgttggcccttgattgtgattggtggttcttctgaaaggaatcaagaagcaatgggagccttccaggagtttcctcaggttgaagcttgcagattatattccaagttctctgcccggccaagcagcattcagcacattccttttgttattgaaaaggcagtgaggagcagtatctacggtcgcccgggagcgtgttacattgatgttcctgcagaccttgtgaccctccaggagagcacgacttctataaagtacaaggaatgctgcatgccacctccacttagcctggcagaaacctctgctgtgcgtgcggcagcctctgttcttaggagcgccaagcagcccctgctcatcatcgggaaaggcgctgcttattcccatgcagaggacagcatccggaagctggtggagctgtgcaatctgccatttttacctactcccatggggaagggtgtcgtccctgacaaccacccaaactgtgtgggtgcggccagatccagggctttgcagtttgctgatgtgattgtgttatttggtgcaagactcaactggatattacattttggactgccgccaaggtaccaggcagacgtgaagtttattcagattgatatctgtgcagaagaactggggaataatgtaaggccttcggtgactttgctaggagatgtaaatgctgtttctaaacagcttttagaacagtttgttaaaaatccatggcagtaccccacagacagcaaatggtgggagactctgagggagaaaaggaagaacaatgaagccgtatccaaggaattagcttccaaaaaatccctccctatgaattattacacagtgttctaccatgttcaagaacagttgcccaggaactgtttcatagtgagcgaaggagcaaacaccatggacattggacggactgtgcttcagaactaccttcctcgtcaccggctggatgccggttcctttggaacaatgggagttggtttgggatttgccattgcagctgctgtggtggctaaggagagaagccctgggcagcgggtcatctgtgtggaaggagacagtgcctttggattttccggcatggaagtggaaaccatctgcaggtacaacttgccaatcataatcttggtagtgaacaataatggaatttaccaaggttttgatgctgacacctgggggaaaatattaaattttcaaggaactgctacaacaatccctccaatgtgtctgcttccaaactcacactacgagcaggtcatgactgcatttggaggcaaagggtattttgtacaaacgccagaagagctccaagactcgctgaggcaggctctgaaagacacaagtaaaccgtgtcttatcaacatcatgattgaaccacaaagtactcggaaggcccaggattttcactggctcacccgttccaacatatgaataaactacttggcgttttttgaggcattttctctttcctacaaggtagaattaccttttcatagcaaaattaccacaatgctaacattgtatttaaaaatacactttaaattgtcttttatagtaaagaaattgattaaagctgtcattatttgttaaaa

SEQ ID NO: 728 - DNA, 3657 bp, Rattus norvegicus
ccaacacagaactatggaagtccacgaattgttccggtattttcgaatgccagagctgattgacattcggcagtacgtgcgtacccttccaaccaacacactcatgggcttcggggcttttgcagcgctcaccaccttctggtatgccacccggccgaaggccctgaagccaccatgtgatctgtccatgcagtctgtggaagtaacgggtactactgagggtgtccgaagatcagcagtccttgaggacgacaagctcttgctgtactactacgacgatgtcagaacgatgtacgatggcttccagagggggattcaggtgtcaaatgatggcccttgtttaggttctagaaagccaaaccagccatatgagtggatttcttacaaacaggttgcagaaatggctgagtgcataggctcggcgctgatccagaagggtttcaaaccttgctcagagcagttcatcggcatcttttctcagaacagacctgagtgggtgaccatcgagcaggggtgcttcacttactccatggtggttgttccgctctatgacacgcttggaaccgacgccatcacctacatagtgaacaaagctgaactctctgtgatttttgctgacaagccagaaaaagccaaactcttattagaaggtgtagaaaataagttaacaccatgccttaaaatcatagtcatcatggactcctacgacaatgatctggtggaacgcggccagaagtgtggggtggaaatcatcggcctaaaagctctggaggatcttggaagagtgaacagaacgaaacccaagcctccagaacctgaagatcttgcgataatctgtttcacaagtggaactacaggcaaccccaaaggagcaatggtcacccaccaaaacattatgaacgattgctccggttttataaaagcgacggagagtgcattcatcgcttccccagaggatgttctgatatctttcttgcctctcgcccatatgtttgagaccgttgtagagtgtgtaatgctatgtcatggagctaagataggatttttccaaggagacatcaggctgcttatggatgacctcaaggtgcttcagcctaccatcttccctgtggttccgagactgctaaaccggatgtttgacagaatttttggacaagcaaacacgtcagtgaagcgatggctgttggattttgcctccaaaaggaaagaggcggagcttcgcagtggcatcgtcagaaacaacagcctgtgggataaactcatctttcacaagatacagtcgagcctgggcgggaaagtccggctgatgatcacaggagcagccccagtgtctgccacagtgctgacgtttctgagggcggctctcggctgtcagttctatgaaggctacggacagaccgagtgcaccgctggttgctgcctgagcttgcctggagactggacagcaggccatgttggtgcccccatgccttgcaattatatcaagcttgtagatgtggaagatatgaattaccaggctgccaagggcgagggtgaggtgtgtgtgaaaggggcaaatgtgttcaaaggctacttgaaagacccagcaagaacagctgaagccctagataaagatggttggttacacacgggggacattggaaaatggctgccaaatggcaccttgaagattatcgacaggaaaaagcacatatttaaactagcccaaggagagtacatagctccagaaaagatcgaaaatatctacctgcggagcgaagccgtggcccaggtgtttgtccatggagaaagcttgcaggcctttctcatagccattgtagtacctgatgtggagatcctaccttcctgggcacagaagagaggatttcaagggtcctttgaagaactgtgcaggaacaaggatatcaataaagctatcctggaagacatggtgaaacttgggaagaatgctggtttgaagccatttgaacaggtcaaaggcattgctgtgcacccggaattattttctattgacaatggcctcctgactccaacactgaaggcaaaaaggccagagctgcggaactatttcaggtcacagatagatgaactgtactccaccatcaagatttaacatgaggaagaatccttagaggaaatggcgcacctccacaatcctcctcgtaccaatggcctttgagttggtaactctgcctgcagcgagtgtgggaaaggaaatgccatgctggacttgtgcacagggtcttaccatagggatagcagagggcacggaacactgccttacagtcacctgtgttgtagcccatgatcctggggatacacagtttccaaaacgagccttaaacattgtaaaggggaacccataaaagtgctaagttatttaagacttcaaccaataaggtgggtgttaaaacttctgtctcctgtttttctaaccaaggggttaggacttactctttctgatacgtctgctgctggctgcacaccctgcagccgtctgctgctctgaagagtacagtacactggaagaaagctacccctttaagagcaactgtccaggctgaagaaagtcacagtggaccagagatttctcttcttaaccccttccccttgtccctttccctcaccactcacatgcagtacatttatgtgacccttctggtttgtaagggttccaaagggtccctgttgtgcctgctggtaacctcgtgtttccagtacactaaagaacagatcctcctcagaacaatgcgggtacccagtctcagaaaaggaaaaaaaaaaaaaggtggctcctgcgttgagccagcaacttgcaggctcacacagatgtcctcagactccgctccatctctgctccctgcccctcccattcttcccaggggttatgagaaaccctgccttagactctgcagtgaagatggtgttccgaagaatgacctggatgggccatgctcaactgtgattcctcccccgctgtccactcgctcgctcgtcgtggaaccagcccgtatctgcagcggcctctgtgctccaaatgtggttttctagcaaatgctaatgtggtgatcaacttgctttgttttctttccctcccagttaaactcaggcacagcatgtcttcagaagtatctaggcagttggtatacgtgggtacttattaaagtggacagtaataagtaaatgtccttattataaaactacctgatttatgtgaaatgcatttgataagccaaaaatctggggtgtagaaatctgggggaaaaaaaatcatatcctgggatcaacttcccaaggtatattttttaagttaatttgggaaatgaacagcatttcactttgccgcgagtcttggccacatttgacctatttgagctgtttatacatttgaagccactgttgttggctgtgtgacagtgtgtgtatcttgaagcacaactgggtttgcactaaagaatcatcattgtaataacactatttggtagcctaacttcattttcgtattcttaactgcacaggaagtcgataatttgtcacaacggggttttgaatgtttgctttcagtgttggctatttctatgttttataaaccaaaacagaatttccaaaaacaatgaaggaaaccaaaataaatatttctgcatttggagtgagtgg

SEQ ID NO: 729 - DNA, 433 bp, Rattus norvegicus
ggcctttgagagatttattgaagaacaagtatcagcgggacactgaaacagtcacaccaactgttagagcaaaaaggcactttactgtctttagaatctcactccatttggtaaggcactgcagccctgtcgtgttttcagtgaacacacagttttaaaggcagcaatgagtaactccggcctaagtgagcacaggcactaacagttgaagactcactcgctgtggtcacggtatgtaacttactctcaaaagagctcttactagtattctaaaaacgtggcagtatgaaaaaaatcagtttctcttcagtctgtggtctcttccaaagacacctgtatgtaaaggtattttttcttttacgtatccctgggcaacagtgaaccatgcataaaatatcaaaattccctcttagaaaataaacgtcaaaggacg

SEQ ID NO: 730 - DNA, 1332 bp, Rattus norvegicus
ggggggctctgtggtaacagttctggaggtgttgcggtcccgattgtcccactggggacccgagccgagtcaccgtcagaatgtcgggcaaagaccggattgaaatcttcccttcgcgaatggcacagaccatcatgaaggctcggttaaaaggagcacagactggtcgaaacctcctgaagaaaaagtctgatgccttaactcttcgatttcgacagatcctgaagaagataatagagactaagatgctgatgggtgaggtgatgagagaagctgccttctcattggctgaggccaaattcacagcaggggacttcagcaccacagttatacaaaatgtaaataaagcccaggtgaagatccgagcaaagaaagacaatgtagcaggtgtcaccttaccagtgtttgaacattaccacgaaggaactgacagctatgaactaaccggtttagccagaggtggggagcagctggcgaaacttaagcggaattatgccaaagcagtggaactactggtggaactggcttccctgcagacttcctttgttactctggatgaagccattaagataaccaacaggcgtgtaaatgctattgagcatgtcatcattccccggattgaacgcacccttgcttatatcatcacagaactggatgagagagagcgagaagaattctataggttaaagaaaatccaggagaagaaaaagattatcaaggagaaaagcgagaaggacttggagcggcggagagcagctggagaggtgatggagcccgccaacctcctggcggaagagaaggacgaggacctgctgttcgagtagctgcccgctgctcccttcaggctgagcatcatttaactcagtgtgcaggttcggtatgtgcgggtatttattttggcagaagagttcatctggctgtaagatttatcagaatgctgtgtgagaccatttttcctgcatcataattcagcaacctgagatttgtaaaacccacccagcacttacagaatctccccagtgaaagagtcataccatcctatttacactagtttgactgatgtgtttaaaactttaggaaatacttactataaacattcatggtctcaggcaaatgctgagcagccttccttcctacccacttgtaaaccttggcactgttgtctgaggctgtgcagccattgtgttactgtggactcaactctatgcctacttttctttgcacgatgtgtctgtgtgtaatggaagtggttctgcccatttaaatatgacttatgaacagagtaaaatgatttaaaaaaccaaaaaaaaaaaaaaaaaaaaaaaaaaaaaa

SEQ ID NO: 731 - DNA, 1860 bp, Rattus norvegicus
gtgcggtgattctggaccgtgccgatttgctcgtctctcagctctcctgttcggcatctctttactccaggaggaaaaatggcatcagtagcagtggatccacaaccgagcgtggtgacgagggtggccaacctgcccttggtgagctccacctacgacctggtgtcctccgcttatgtcagtacaaaggatcagcacccgtatttgaggtcagtgtgtgagatggcagagaagggagtgaggaccgtgacctcagtggctgtgacaggcgcactgcccatcatccagaagctggagccacagattgcggtcgccaatacctatgcctgcaaggggctagacaggatggaggcaaggctgcctattctgaaccagccaacatctgagattgttgccaatgcccgaggtgccgtaactggggcaaaggatgtagtgacgactaccatggctggagccaaggattctgtagccagcacagtctcaggggtggtggataagaccaaaggagcagttactggcagcgtggaaaggaccaagtctgtggtcaatggcggcatcgacacggttttggggatggtgcagctcatgagcagtggagtggaaaatgcaattagcaagtcggagctgctggtagaccagtacttgccgctcactcagaaggagctcgagatggaagcaaaaaaggtggaaggatttgatatggttcagaagcaaagatactatgaacggctggagtccctgtctaccaagatctgcacccgggcctatcatcaggctctcggcaggatcaaagacgccaaacaaaagggccaggagaccatttcccagctccactccactgtccatctgattgaattcgccaggaagaatgtgcacagtgctaaccagaaaattcaggacaagctctctgtctcatgggtggagtggaagagaatcgtcggctacgacgacacggacgagtcccattgtgctgagcacatcgagtcacatactctgtctatggcccgcaacctgacccagcagctccacactacatgccagacgctcctgttcaacgtccaagggttaccacagaacattcaagaccaggccaaacacttgggggtgatggcaggtgacatctactcggcgttccgcaatgttacctccttcaaggaagtgtctgatggcgtcctcacttctagcaaggggcagctgcagaaaatgaaggagtccttagatgaagttatggattaccttgttaacaacacgcctctcaactggctggtaggtcccttttatcctcagtctaccgaggtggacaaggccagcctgaaggtccagcagtctgagctcacaactcagtaaacctgctcttgtcaccagtgtatgatgttgctgaccaggtggcaccttttattttttattttttatttttttgtattgaaattaacctgattagattagaaaagcagctagtttgaacaaaggtcctcattatggtcattcacagctcacttatggtcgtgcccccgctggccctgacacatgagttcttcttacccggctggtatgtggagtgtgttagttttgtgaggacctcaccagaaccttaaagctcaggtgcgcttacagtcttgtccatggcctttgtgttcttattggctgtaaacgtctgtctgttccgaataaagatttgttcatgcggcctctgctctgaatgggcatctgctcctgtgtggtccgagcaggcttcatcactgtttccctcaaggcatgttcttgtgtggcttgaatttagttttttccatgtgaagaaatatcacctttggacccaataaaattcataacagggaaaaaaaaaaaaaaaaaaaaaaaaaa

SEQ ID NO: 732 - DNA, 476 bp, Rattus norvegicus
ctgggcatgacatttctactcctgcatcttctcgatagtttcttccttgtatttgcccttctcctttcctacttgccgggacttggctttcctctccaggatcttcttgcggtccttgtccagctttagcctggtgataaccaccttgctggggtggatgcccacatggacagttgtgccgttagccttctctcgctggactcgctcaatgtagatgacgtatttcttcctgtacacttggaccactttgccaatctgctggcctttgtagtgtcctcgaacaacctgaacttcgtcgtcctttcgaatgggcatagaccgaacattatacttctgtctcaattctttggaaagcggctaagacatgatcttcctccgaatgtgagatggtgcattgaaatgccgtttgcggttcttgcttcggtcagaagtcacgaagggattgaacttcattttggcggctgcaatccagcgat

SEQ ID NO: 733 - DNA, 547 bp, Rattus norvegicus
aagatcacagttaaagtactttagcatgttatacacatgacttacatgtgcaatttttagaaatatcaaattaggtataagattttgaagaaattatataaatgtgtatattgacttttactacacatacatctaagaaagcaataattctgttgtaccattaactggaaatcatttattacatggcatgtttacaccaactctaaagagaaccaagtcaatttccaaagcaaaataaaaaaaaaaataaaatgagcgaatcagtcatgctaaaactgtcaacagacttaagacctggggtcaaatgaagctatggttaatttatgacatgtatgtaagcagttcaaacctatgagaaccagtttataacctggtgtgtggaacctcaggaggtttcatcaaccttttgacaaattcctgagagccagaggcttgttagtgcgaatgacatgaaaatgtggctgaacacttgcttagctcaaggtccccagccttccagaccccaggttctgctgctctgagagcccaggcactgaagtgaggtgtc

SEQ ID NO: 734 - DNA, 506 bp, Rattus norvegicus
aataatacattatatcatcagtagaaaacaaaacgaacaaaacagccattttggaaaataacgtgctaattgcccaataccagggaaagcaggtcccctccctggactctactggcaagcccaggtatgccctgaactctagagtctccatcttgtatggatgatgaagcattcaagtaaacggtgaggcattctgggtgtgagtttctgagaggtaccacctcagaggagactccagaacagccgcagccctccagttcatccgtggtatcgcgtggtcttgggattaaccagcagttttcttctgaggaactgtgataattgtcagcctcaggatttagtggttataaaacaacttccatattaaaaaacacttgagacacacgaacatgattctcatcgcttctccaacttcttgtacttggcttctagttgaggaagaacaggaattgtgtctttgaacactagtgctcacaaagatattttttagttagattttcaagcaa

SEQ ID NO: 735 - DNA, 592 bp, Rattus norvegicus
cccgaagacaaccaaagcttccagtacgatcatgaggccttcctaggcaaggaggattccaagaccttcgatcagctaagcccggacgagagcaaggagaggctggggaaaattgttgatcgaatcgacagtgatggagacggccttgttactactgaggagctgaaagtttggatcaaacgggtacagaaaagatacatctacgataatgtggctaaagtctggaaggattatgatagggacaaagacgaaaagatctcctgggaagaatacaagcaggccacctatggctactacctgggaaaccctgctgaattccaagatagctctgatcatcacacctttaaaaagatgctgccacgggatgagaggaggtttaaggcttcagacctcgatggcgacctgacagctactcgggaggagttcactgcctttctgcacccagaggagtttgaacatatgaaggagattgtagttctggaaaccctggaggatatcgacaagaacggggatggttttgtggaccaggatgagtacattgcggacatgttttctcacgaggacaatggccctgagccagactgggttttgt

SEQ ID NO: 736 - DNA, 503 bp, Rattus norvegicus
actggaaaacatgcagcagcatggaggacttttattaagtttataaacaccaggaactgtaataaaatataaaatacagagcatctctttttttaaatatcaagtttctgaatgcttcattcgtcctttggtttcaaaccatacaatgcactcatgatacactgttcatgtggcaatgggacagtgctctgcccaactgctggggaggaagggtgctgtaggaataccaaagcacggctttatagaaagggaagcattgaagcaaaaatactttctgaatatatatgtgcatatatatactgtacattgtaaacaaacgttcggagtaagaaccaacacaggccaagaaacggtttccagggaaaccaggatcctcttccttgtccacagcggaggctgaggtggggcctggtcctctatttgctcatgtgcttagatagcgtggagatgactaactgatacattcatttgctaatggtctgtccatctaggttggctggctg

SEQ ID NO: 737 - DNA, 1888 bp, Rattus norvegicus
ctcaggaaggcttcggctgacaggagaggcatgcagacctcaagcagacgctcccttgaagggcaggttgcattcatggttggttcatggaggcggccttggctaggcctgggcggcatcagcctccaacagcagcagcagcagcagcagcagcagcagcagcagcagcagcagcagcagcagcaggagcagcagcagcagcagcagcaaggcgctggccgttccgctcacccacaagaacagctgccaccagtaccctggggatgactagaggccggaccacaggccacaaaaagaagaaggctaccccacttacagatgcagaccatgtgggggtccggagagctgcttgtagcgtggtttctagtactggcagcaggtggtactactgagcatgtctacagacccagccgtagagtgtgtaccgtgggggtttccggaggctccatctcagagacctttgtgcagcgtgtataccagccttacctcaccacttgtgatggacacagagcctgtagcacctaccgaaccatctaccggactgcctaccggattgcctatcgccatagcccggggctgactcccagcaggcctcgctatgcctgctgccctggttggaagaggaccaacgggctccctggagcttgtggagcagggcaacccttccctggatgccgcagggttctgggaactcccctgaatgggtgacagacaggcctctcctacccacagcaatatgccagccaccgtgtgggaatgaagggagttgcatccgcccaggccgctgccgctgccctgtgggatggcagggagatacttgccagatagatgttgatgaatgcagtacaggagaggccaggtgtccccagcgctgtgtcaatactgtgggaagttactggtgccagtgttgggaggggcagagcccatctgcagatggggtgctctgcctgcctaaggaggggccctccccggtggcaccaagtcccacgccaggagtggacagcgtggtgagagagraggtgtacaagctgcaggcccgggttgatgtattagaacagaaactgcagctggtgctggccccactgcacagcctggcctctcggtccccggagcatgggctgcaagatcctggcagcctgctggcccactccttccagcagctggaccggattgactcactgagcgagcaggtctccttcctggaggaacagctggggtcctgctcttgcaaaaaagacctgtgatggcttctcagtgcccatgttggattgagctgttacccctacgtcccttctagcctgagttcaagtgctgtccggtggtgcctgtgagcagaaggccctgcttgtttatccctctctcttaggaggttcctaggccctgggcatggggaggggggtcttgtgtggctcttaagtgaggcttccgggaaaggaataagatctccctgcctaagaagtgaggtggggggctgtctccacctttgtcatattaaagctgggacttgagctgctgtcactgggtgagtcggactgtgtacacactgtactactgccatgtaggagctgcagtgggcagtcctgaggctctcttcagcctatgctgatgctgccaagcccgtggtctgcacacccttcagttctgtggaccctgcattcactgagcaaagcaatgctggctgatcacagctcacctgcaggcagttagggaggagggagctcagacaccgcagccccagggatcgattcacacaccatctttcccacccttcatccctggatggggacttgggaagaactcttaccaccctctggtctctaggcacttctgagttcatttataaaaaaaagacccaaaaaaaaaaaaaaaaaaaaaaaaaaaaaaaaaa

SEQ ID NO: 738 - DNA, 336 bp, Rattus norvegicus
agcaaagccgagagactttaatggagaatgtgccacagcagggtggggagggacgggatcaaagcgtatggaggtcgtgacttcgacggctcagtttctctgggtcgtccgacgccatgagggagaagtctcggaatatgtcgagatacgtctcgtctcctgtctggccctgggccgcttcagcctccctcatctttgccaatcgtagcagagttacgatgtcagccggttcctccccatctttgctgctcctgagactcacgaactccatgatgtcgaatttcctcttatcctcgatcacattgacctgcagggcataatctaatgctcggctcc

SEQ ID NO: 739 - DNA, 1089 bp, Rattus norvegicus
acgcggcgccggcgcggaacccgctctgctgcagcgatggctgccggtgttccttgtgcgctggtcaccagctgctccgccaccttcaccggggaccggctggtgcaacatatccttggaacagaagatgctgttgtggaagcgacttccagcgatgctgtgaggttttacccctggaccatcgataacaagtactactctgcagaggtcaacctgtgtgtggtgccaagcaagtgccgggtcactgccgagatcgcagaggcagtccaggcgtttgtagtttactttgatagcacacagaaatcaggtcttgacagcgtctcctcgtggcttcctctggcagaaacatggctgcctgaggtgatgatcctggtctgtgatagagtgtgtgaagatggaataaaccgacaacaggctcaagagtggtgcatcaaacatggctttgagctggtggagctctgcccagaggagctacctgaggaggacgatgacttccctgaatctacaggcgtaaagcggattgtacaagcattgaatgccaatgtctggtccaatgtcgtgatgaagaatgacaggagccagggcttcagccttctcaactcactggctggagcaagccgcagcgttggatcagcagagagctgtcagtgtgagcaggagccatcaccaacagctgagaggacagagtccctccccgggcatcgcagtggcgcgtgtggcccagcaggtgcacaggttgacagcattgttgaccccatgttagacctggatattcaagaattagccagtcttaccactggaggaggggatctggagaactttgagagactcttttcaaagttaaaagaaatgaaagacaaggctgcgacgcttcctcatgagcaaagaaagttgcatgcagaaaaggtggccaaagccttctggatggcaatagggggagaccgagatgagatcgagggcctttcttctgatgacgagcactaagttctgcctgctaggtttgactgacaccgatgatgccagcactgtgcgtcccaagtgcttcccttctcaaccgggttctgttctgccaagactgccgtttgcacg

SEQ ID NO: 740 - DNA, 356 bp, Rattus norvegicus
acaaagtatgatgggcagaaaatatggtacttcttatacaggagactgaaacagaacaagactgtgagattagacttcacgtacaaggaagtaacaatcatcaaaacactataggactctgtcttttcacatattcttcctgagctgttgccagttatctgcgacctaattctgatttggagagaaatcaccacctacttgtcatgtgtcgcctcctcaagccctagccttgcaggtccaggaaagatatcaatctccagtaagaaaagctcaagcccacaaaagcctcatacccatttaccacttcagctctctgctagtctgattgatcatgcaacctcccatacagcagacat

SEQ ID NO: 741 - DNA, 443 bp, Rattus norvegicus
gactggtttggaagcagttttaatggagatgaaaatgttttatcaactcaacacaggtacccccaaaatacaaatcaaaatatcatcttcagctgcatagcaaatatgatttaagaatttaacatcattattcgatcacaagcgtaaatataagttcaccataaataatgtaaattcattgtacaaaaaatccccaacaactcttaatacaaatatggtacacatttgacagtctctgaaacagaattctttttaaaacattttaaaatctaagcttttttcttgatttttaaatacattaaaaaaaatcaaagaggggtgtggggtgggaaacaaggatcactagagaggaaagagcattaaagttgttcagtgtctgtagacaagtgctgcagaaatggaatctctgtcctcaaagtgaggaccttggtttattgggatca

SEQ ID NO: 742 - DNA, 430 bp, Rattus norvegicus
gggaacagaacgtgtcctttattgagcatccagagggcccctcagttctgactcagcagccagaggggaaacaagcaggcaggtggtgggggcaggagagcagggatggggacacccaccctcacttccagtccttgaagaactgcttgaagatgggactctctcggccctggggcagaatctccacctgagtgtttggggaatatctcattcgagagatgaagccatcagccacttggagggccgcctgccgctccttctcattggcttttctccccttccagatgtagattttgccacatagcccgttgtccagaacaaagcagtcatctggaattagcagttcagaggcaaacgggctggagtcagccaccttggtcagattcatctgtccagtggcatcagagaccttatacagggctgcagcctg

SEQ ID NO: 743 - DNA, 486 bp, Rattus norvegicus
gaaaaatgccatacaagaagcaagaccaaacacttacctaaacactacagccacatctgtcactacaaaggtgcagacagcaggctcagttactgcctatctcacctaagggaggggtttttcggctggactccgccggcatagttcctattttgtcaaatgtaaacaactacttgatatgattcataattttaaaaaaatttacaaagctccttcatttttgtcatgaaaataatatatctgagagatttgtaaaaacaaccagcctagggctggtatttcccatgagcatcacggtgctggccaggctgtagccccagctccattcctcaaagtgggccagggctcccagaccccgaatacactgctggccttggggagggcccccggagtcagcctccttgagccctcagtttacgaatatagggcttgctttgtgggtgggtggcagagatctcatgtggtttgaaggaaatctacttctga

SEQ ID NO: 744 - DNA, 397 bp, Rattus norvegicus
gggtggatcctgagctgccgaagccgctgccctgctctccgtcgcgggctcctttaatcccattgtttcttttagattcgtttgggcctagacgccctcggggcccgatattcgggttgggcggtaccgcggcctgggcctagtgacttaacagtagcaacagcagcggcggcggcggcagccgacttcccgattcgagcacaggcgcgcgaaaatccgcacaggcgagtagagaaaatggcagacgatattgatattgaagcaatgcttgaggccccttacaagaagacttgcctaacgatatctcacctctactcccatgaattcacctttgattccagtgtgaactgtcaatcataaggatgagaacaagttgaacagtgctaacggccatgaa

SEQ ID NO: 745 - DNA, 407 bp, Rattus norvegicus
caattcaaagcaaggtttaatctgtgcacagaacagccaatctggcggccatctccccgtaaagtttgagttctggaactgaagggggtggggttttgcaagcaggaagaacaaggcagttaaggaaatcttctcagaacatctggtacagaacattctttggttatgggatggggtacagctaaattctgagaagcagacattggaacgtaagttttacagtaaacagagcctcgaaacgactcctggccttcaaatggacttgaactggtttctgactcatctgtcttatgtgttcctgtcacataagcctcttggaagctaacatttctggctattgtaatggctactagtggcaagcattttagcattctttatttgtccgtagacaagccttgtgaagcgct

SEQ ID NO: 746 - DNA, 955 bp, Rattus norvegicus
tccagagggtccaggcatgtccatcagggctatcttttctccttagcgggacatggcccaaagtcccaagcagtggaggttcttgacaagtcatgtgtgagtcctacttgtcctaggctccggtagtcgatcctctacttagacctcaccactgaggtccgtccgcttcgtcaatgggaggtatggccaaggtgctgttgatcgtcttcatcatggtttatgcaggatcctgtgctatctgggtgtctcagccccctgagattcgtgcacaagagggcaccactgcctccctgccctgttcgttcaatgccagcagagggaaagcggccattggctctgccacatggtaccaagacaaagtagccccggggatggagttgagcaatgtgaccccagggttcaggggccgagtggcctctttttctgcttcccagttcattagaggccacaaggccgggctgctcatacaggacatccaaagccatgacgccagaatctacgtgtgcagagtggaggtgctaggcctgggcgtcggaacaggaaacgggactcggctggtggtggagaaagagcctcctcaacaagcctccaacacagagccagagcgagctgcctacacaagtctcctccttcgcgctggcgtctatgcactcagctttctctctgtggccaccggcagtgtcatctattaccagggcaaatgtctctgtcacgtgggaaacaccgccactcctcccacagcctctgaggagcgattctaaatcccaaagatccagcactcaaagaggcaggcaataaatccttacattttctcgtaaaaaaaaaaaaaacctgaggatcttcatactacattgccctgaggtgggcgtgatattaaaaacctcccacctcctgactgaacataagagcatgtgtgtactgtttgctttatgtcaataagcatgcatcattcata

SEQ ID NO: 747 - DNA, 663 bp, Rattus norvegicus
attcagattcctttattgagtacttgttaacaataaaaaaaggtatgaagtcctattccaaagtctaaactcacttttaacttaaaccttgagttttctgaattaccaagtctgaagtaattctctttatacctgaagaatgtttttattgaaatgtttgagagaaacatttgtactgcaaaaagcatatgacaatcatcttgaggatataaatcaagtgtaaaaacaacaaaatttagcaggaaacccacattgcacaagaaatatgtaacaccactgtttgtaatttggtggcttggcttgcttgttgtataactgaacaccgcttttgatagcttagcctcccatggaaaggtaactgtgtgctttgggtttttccagcctcttcttgaccatgttcactgagcaaagacttagctgtgtggatccagtcacaatgatggtctttggtggattcctaatataatcagaacttctctcattgagataaaatccctgcatggtcctatatttccttcagttcctaccccacaggagactatcattttcctatgtttctcattcagaaacaaattaactctgcgttcagatttgcttgacaattagcttctgtttgttgccatttcagattccgaagtcaatggggctcttaaaatttccctt

SEQ ID NO: 748 - DNA, 1426 bp, Rattus norvegicus
ggaagaggcggaggcggctcccgcgcgctccgggtagctgaggcggagggtaccgctgggctgactagaacagagacaatgtttcgagcagcggcgcctgggcagctccggcgggcggcctcgttgctccgttttcagagcaccttggtaatagctgagcatgcgaatgattctctagcacccattactctaaacactatcactgcagctggacgtcttggaggtgaagtgtcctgcttagtagctggaacaaaatgtgacaaggtggtacaggatctctgtaaagtagcaggcgtggcaaaggttctggtggctcagcatgatgcgtacaaaggccttcttccagaggaactcacaccattgattttggaaactcagaagcagttcagttacacacacatctgtgctggagcatctgcttttggaaagaaccttctgcccagagtagcagccaaacttaatgttgccccagtttctgacatcattgagatcaagtcacctgacacatttgtgagaactatctatgcaggaaatgcattgtgtacagtgaaatgtgatgagaaagtgaaggtgttttctgttcgaggaacatcttttgaggctgcagcagcaagtggaggtagtgccagttcagaaaaggcaccaagttcttcatcagcaggaatatcagagtggcttgaccagaaattgacaaaaagtgaccgaccagagctaactggtgccaaagtggtggtatctggtggtcggggcttgaagagtggagagaactttaaactgctgtatgacttggcagatcagctgcatgctgcagttggtgcttcccgtgctgctgttgatgctggctttgttcccaatgacatgcaagttggtcagacaggaaaaatagtagctccagaactttatattgctgttggaatatctggagccatccagcatttagctgggatgaaggacagcaagacaattgtggctattaacaaagacccagaagctccaattttccaagtggcagattatggaatagttgcagatttatttaaggtggttcctgaaatgacagaaatactgaagaaaaaataagtcaaaatcatatcttaaggaaactgtcaaaagtattcagttgaaatcatagaagttcataatccaaagaaagaaaatatgctaacagcagctagaatgccttttgatgaatcaattattatattcctttttaattttttgtgattccaaacaattatttttgacattttctaattctataataaaaaaatataataaagtttcaccttcctttaaaattaaaaaaaaaaaaaaaaaaaaaaaaaaaaaaaaaaaaaaaaaaaaaaaaaaaaaaaaaaaaaaaaaaaaaaaaaaaaaaaaaaaaaaaaaaaaaaaaaaaaaaaaaaaaaaaaaaaaaaaaaaaaaa

SEQ ID NO: 749 - DNA, 560 bp, Rattus norvegicus
cacagagagcaagttttatttggtgaaggcaaacatcatccaaaagaaaccagacaggcaaggtgctgtgattagggagcctctggggccacacaggaatctcacactgggcaaggagcaggctcgagacacgtaaatgtcctcagccattcagcaccatccggacaagctctgtaaagagatggggtggagtcagccaagcacagggctggggaggggtacccatgggccaggagaccacaagaccatgaaggtggcatgagggaacgtgcccatagcagccaaccttggggtcagtatccaaaacagccaccatgagtgaccagttctctctgtccctggttcccctcccactagctgttagcccccaccccactctaaatagcaagaacacagcagaggcagaaaggttctcagctacacctacagtcactgtcagccgccggcaggaggagcggcagtttggggtgaggtacctccaagctctccaagctgtccagcaggggtggaaaaaggactgtggtgtttcagcagcagaatggggcagttagctccccagc

SEQ ID NO: 750 - DNA, 582 bp, Rattus norvegicus
cacatacaagtgtaataaggttttattaagtaattaaggggacgcatcacaaaatagaagcatgcaacccaacagaaacggatctgggatttcgaggggcgggggtggaggcgcaaatcagtcacaaaaccagccacttcctcacccaaacgacaataaggtcctgtcagaaacggaggcagcaagtctgacagggctgtttgttactcctgggttttgtaatgatttccatggagctttcaagacccagccatacactcaggatcgagacttcatagtggatgccgctaaccccaacaagatggctacgaccgtgaaaccctgggcagcgatccgggtgcgcatcattagttgggatcggtggctctggccgcggtggaagcagtaaaggccataggtgagtgcagccgccgtacccagacagcctataggcaccattgggttctcacgggtcttgcgaataaacttttccttgaagccctctggattggtgtagaccgtggggctgaagccctcgataactggggccttggacggatcaaaaggcgcctctggactcacaggaccgggagccgccatacc

SEQ ID NO: 751 - DNA, 599 bp, Rattus norvegicus
aaatgttaccaatctataaatattaaacatacagaacaaaccatagttatttgcttgtacccacttagcattgacctgttatccatgaagtacacagtaataatcatttttgtcaggaagtgtttttaagtcagaagacttggggtattactgtctgtagtcagtgagggccgcctcagtggagatcctgaaacgaatccttgacccacagaagaattttttttttttaaagttcctatgataaaacaagacacctgtgaagaaattacttggaaagtaaaaaccaagtatgtgtgcataagtcccaagtgattttttttgtcagttacactcttatgacctgaacaataacttaaatactcctagcacagtgcttcagttgaaagtaaagaacagtgtgcgaatggtagccagttacttttaaactcaagctaggatttctgttgctggagggaaaagtgacttggctgttggaagagtagaaatgtgtcagccttggggaggctcattcctgctgtctgaactgcattgcggggcgtcaccaggaacttcacaaactccccagggatgccttgctgggaagccctgaccactactag

SEQ ID NO: 752 - DNA, 530 bp, Rattus norvegicus
taaagagctttatttggcttgtacagcatggactttcatacattctccattaatttgtcattaaagtgccagacatttctttaatcacgatgacatttgttaaagaaatcggaacttttctcaagacacatcggtcatgagtgaatacttttcttaccaaacccagaatgtaagccccctcacattgacctgatgggttggacaacttgcgaacagattcgaatcccctctcaccttgagcaccaaactaggctgggactaacacacctggggattaagaagccatgctatagagattgagaaacaaccaccccactggctgccgcctcgtcagggccatgccagggcttcacggtttgtacaggtccaacctttagagcaattaagacctcgcctcctctgccaccttttatctcaccctcccttactcacaaaagccgccaaagtcattacaatgaaaataaggagtgggtttcccgttacccaggtactaacgaggttcagtacaaatagggaagataaacgcaaaa

SEQ ID NO: 753 - DNA, 2309 bp, Rattus norvegicus
ggcacgaggacactgatgagcagagaagaaagctttcagcaatgtgtcatttgtcacaattgtcaggctttttaaaaaaggactcccaaagagagatgctgcatgttttctgtgttaacacagactgatttcctctccagactctttaagtttgcagaagcttaaatatagagccctgtttaaaaaaaaaaaggaagagagaatttgtgtgttaatcggccttgtgaagaagtgcttcatcacccttctgcacctccctgtgctctggtgtgtggcgtggccacggctctctaggttagggctctgagctggctgcagcatgctcatgtgttagctgagtagagttcaccggcagtcgcaggctgatacagggttttttgttttttgttttttgtttttctattcctttgagtatcaaaatgccatccaaagagtcctggtcggggaggaaaactaatagagctacagttcacaaatcaaaccaagagggccgtcagcaagatttattgatagcagccttgggaatgaaactgggttctcaaaagtcgtctgtgacaatctggcaacctctgaaactctttgcttattcgcagttgacatcacttgttagaagagcaactctgaaagaaaatgaacaaattccaaaatatgagaaggttcacaatttcaaggtgcatacgttccgagggccacactggtgtgaatactgtgccaacttcatgtggggcctcattgctcagggagtgaaatgtgcagattgtgggttgaatgttcataagcagtgttccaagatggtccccaatgactgtaagccagacctgaagcacgtgaagaaggtgtatagctgtgacctgacaacactcgtgaaagctcacatcaccaagaggcccatggtggtagacatgtgcatcagggagatcgagtccagaggtctgaattctgaaggactctaccgagtgtcgggatttagtgacctaattgaagacgtcaagatggcttttgatagagacggtgaaaaggcggatatttctgtgaacatgtatgaggacatcaacattatcactggagcgcttaaactgtacttcagggatctgccaattcctctcatcacctacgatgcctaccccaagttcatagagtctgccaaaattgtggaccctgatgagcaactggagacccttcatgaagcactgaggtctctgccgcccgcccactgcgagacgctccggtacctcatggcacacctcaagagagtgacccttcacgagaaggagaatctgatgagtgcagagaaccttgggatcgtgtttggtccaaccctcatgagatcaccagagctagaccccatggccgccctgaacgacatacgctatcagagactggtggtggagctgcttatcaaaaatgaagacattttattttagagttttgacttgaggagaaaaagaaatggtttacagatgaaggaatgttttctagtaatttaattagcttcattagctgaattgtttcttggttagaggtttggccaaatacccagattaaaatgaaggaacttcctgtcatttctctagcaccgctcagccgtccttgtaaaaccgtgaacacacgctttctggtcctggtaatcctgggtgtttatcatgttaagagaaactcaagctactgcatgattacccctttttggtgaggaaaccccatattgaagaatcacagacttgttcctgcaccatctctctgtcctgggttgtctgtggttgtcacccagcatgcttcccagagtaaactgtcatgacattgcttttggggtccataccactggtttctgacgcttgcacatgcgcacacgtgcacacgtactcacacacacacacatgcacatacacatacacacacatacacaccacacacacaccacaaacacacacacaccacaaacacacaaacacactcacaccacaaacacgcacacacacaccacaaacacactcacaccacaaacacgcacacacacaccacaaacacactcacacacacacagacacacacgtataagcagcaccctggctgttgcactctcatccctgtaccatacgccagctccacagcagttccttcccagcttcctcctctcagacatagtgctttgtcttcagcagaagcgagacgtgttttcagatgttacttcagtaagcttccaataaaaatgcaccacacagcactttcctgttaaattattggttttcaactgtaaatttatatttttacctggcatgcagttattaatttattaaatttggcctcgtgcc

SEQ ID NO: 754 - DNA, 569 bp, Rattus norvegicus
tttttttttcaagtttccaaacaagaatttattctttattttttttcccttaaaaaatgtaccaggtacaatttttcctgttttttgttttgttttgtttttcaagtttcagcaaatgcttgttcccctcagccaagccccaagagttaagggttgaggctgggtcagagtcttaagtggggagtggagtaactgggaaccatatgactgaatgaggggcacccctcatcccagctgaggtaggtgggtcagagtctggtcaggtaagaggaggttccccagtccttaggcctgactctgtccctggacaccttcctcagtcaggacaccaaagcaaggagacaaaggcaggaggagagggacaactgagtctgagccctaggtaagaggtggttaaacccctgtgttacacatacactcaattctctctcgcgcaacacaccctacacaaacccaagtttgggtgcacacacacagttgtacacacacacactacacacacaccacacacacacatacacacactggctttcgaagatgggttgaagggcagggaagggaaaaggaat

SEQ ID NO: 755 - DNA, 510 bp, Rattus norvegicus
gacatggcagtgcgggtttaatatacatatatgtagaatatatatgtacacacagttagcacggtcaagatggggaagggcatcttgggacagggaggaggctgggttcactcactgtactctaatggcttggctgtgtggcattcacaaacccaaatgagaaaggtgaccagtcccttcctggattgaatggggtggtagtcagtgcaaaggaaacactgtcgttaacttatctcttgcttggagaattccgaactggaaagtggaaaggttgcctacaatacccattttgggactctgcaggttgcggttaaaacctaagggatctcattccccaattcctacgctccgggtcagtatatcccaacagtctgtatctagaaactgaggagcgagagtgggcctgtctctgcctgcatccctggctcaggctcagcagtgcatggtcccagcatagtctctccagagcagaagttggggacatcaaaagctggcttctccactggggtt

SEQ ID NO: 756 - DNA, 1415 bp, Rattus norvegicus
atggagctgctgtgctgtgaggtggacccggtccgcagggccgtgccggaccgcaacctgctggaagaccgcgtcctgcagaacctgttgactatcgaggagcgctacctcccgcaatgttcctatttcaagtgcgtgcagaaggacatccagccgtacatgcgcaggatggtggctacctggatgctagaggtctgtgaggaacagaagtgtgaagaagaggtctttcctctggccatgaattacctggaccgtttcttggctggagtcccgactcctaagacccatcttcagctcctgggcgctgtgtgcatgttcctagcttccaagctgaaagagaccatcccgctgactgcggaaaagctgtgtatttacaccgacaactctgtgaagccccaggagctgctggagtgggaactggtagtgttgggtaagctgaagtggaacctggccgcagtcacccctcacgacttcattgagcacatccttcgcaagctgccccagcaaaaggagaagctgtccctgatccgcaagcatgcgcagaccttcatcgctctgtgtgctaccgacttcaagtttgccatgtacccgccatcgatgatcgcaactggaagcgtgggagcagccatctgcgggcttcagcaggacgaggaagtgaatgcactcacgtgcgatgccctgacggagctgctgaccaagatcacccacaccgatgtggattgtctcaaagcctgccaggagcaaatcgaggctgtgctgcttaacagccttcagcagttccgtcaagagcagcacaacggctccaagtctgtggaagatccggaccaagccaccacccctacagacgtgcgggatgttgacctgtgaggaagccattcgggcggcaagagagaggcgtgttcgtcatctgctagccccttctctctctctctctagttatgtcttgttcttttgtgttttaggatgaaagttcaaaacaaaaaacaaaaacaaaaacaaaaacaaaatctacccccacctagatcatatttaaaggtcttttagaagtgagagggaaaggccatatagttgaggcacatgtggtacctgttcaaagtccagcagaaagggatcccttgtatatgcgaaccattatcatgtgatgatgtaagagttctagtgagatgcttacaggagagccctcagactagctagagaacatgtatacctgcagtatgggaacgaattagaggagactgtctcttgtgcttgggaactagtgcatatgccccctttagtagaattgcaagaaaccatggatgccggtcgcatgagtagtttgcaaagcattgaacccaagaaggaatcagaaatgagaagggacacagctggggaggttatgccagaaccacccaaccacacgactgaaccattta

SEQ ID NO: 757 - DNA, 5575 bp, Rattus norvegicus
gtttttttttttttttttcctcccctccctcccccgcgtttcatgcagctgatccgaaagggaataaaaggctgcgcataatcataatataaaagaaggggagcgcgagagaaggaaagaaagccgagaggtggaagaggggggagcgcctcaaagaagcgatcagaataataaaaggaggccgggctctttgccttctggaacgcgcggctcttgaaagggcttttgaaaagtagtgttgttttccagtcgtgcatgctccaatccacggagtatattagagccgggacgcggccgtcgcgggggcagcgacgacggcagtcctcggagggagcaccagcgctagcagcggcggcggcgtccggagtgccccccgcgcggcagcgatgcggtccccacggacgcgcggccggccggggcgccccttgagccttctgctcgccctgctctgtgccctgcgagccaaggtgtgcggggcctcgggtcaatttgagctggagatcctgtccatgcagaacgtgaacggagagttacagaatgggaactgttgcggcggagcccggaaccctggcgaccgcaagtgcacccgcgacgagtgtgacacgtacttcaaagtgtgcctcaaggagtatcagtcccgcgtcacggccgggggaccctgcagcttcggctcagggtctacgcctgtcatcgggggcaataccttcaatctcaaggccagccgcggcaacgaccgtaatcgcatcgtactgcctttcagtttcgcctggccgaggtcctacactttgctggtggaggcatgggattccagtaatgacactattcaacctgatagcataattgaaaaggcttctcactcaggcatgataaaccccagccggcagtggcagacactgaaacagaacacagggattgcccactttgagtatcagatccgagtgacctgtgatgaccactactatggctttggctgcaacaagttctgtcggcccagagatgacttctttggacattatgcctgcgaccagaatggcaacaaaacctgcatggaaggctggatgggtcctgagtgtaacaaagcaatatgccgacagggctgcagtcccaagcatggctcctgcaaactcccaggtgactgcaggtgccagtatggttggcagggcctgtactgtgataagtgcatcccgcacccaggatgtgtccacggcacctgcaatgaaccctggcagtgcctctgtgaaaccaactggggtggacagctctgtgacaaagatctgaattactgtgggactcatcagccctgtctcaaccggggaacatgtagcaacactggccctgacaaataccagtgttcctgccccgagggctactcaggaccgaactgtgaaattgctgagcatgcctgcctctctgatccctgccacaacagaggcagctgcaaggagacctcctcgggctttgagtgtgagtgttctccaggctggactggacccacgtgttccacaaacatcgatgactgttctccaaataactgttcccatggaggcacctgccaggatctagtgaatggattcaagtgcgtgtgcccaccccagtggactggcaagacttgtcagttagatgcaaatgagtgcgaggccaagccttgtgtaaatgccagatcctgtaagaatctgattgccagctactactgtgattgtcttcctggctggatgggtcagaattgtgacataaatatcaatgactgccttggccagtgtcagaatgatgcctcctgtcgggatttggttaatggttatcgctgtatctgtccacctggctatgcgggcgatcactgtgaaagagacatcgatgaatgtgctagcaacccctgcttgaatgggggtcactgtcagaatgaaattaacagattccagtgtctgtgtcccactggtttctctggaaacctctgtcagctggacatcgattactgcgagcccaacccttgccagaatggcgcccaatgctacaatcgtgccagtgactatttctgcaagtgccctgaggactacgagggcaagaactgctcacacctgaaagaccactgccgcaccactccctgtgaagtgattgacagctgcaccgtggccatggcctccaacgatactcctgaaggggtgcggtatatctcttccaacgtctgtggtccccatgggaagtgcaagagcgagtcaggaggcaaattcacctgtgactgtaacaaaggcttcaccggcacctactgccatgaaaatatcaacgactgtgagggcaacccctgtacgaacggtggcacgtgcatcgacggcgttaactcctacaagtgtatctgtagtgacggctgggagggcgcgcactgtgagaacaacataaatgactgtagccagaacccttgccactatgggggtacatgtcgagacctggtcaatgacttttactgtgactgcaaaaatgggtggaaagggaaaacctgccactcgcgtgacagccagtgtgacgaagccacgtgtaataacggtggtacctgctatgatgaagtggatacgtttaagtgcatgtgtcctggtggctgggaaggaacaacctgtaatatagctagaaacagtagctgcctgccgaacccctgtcataatggaggcacctgcgtggtcaatggagactccttcacctgtgtctgcaaagaaggctgggaggggccgatttgtactcaaaataccaacgactgcagtcctcacccttgttacaacagcggaacctgtgtggatggagataactggtaccggtgcgaatgtgcccctggttttgctgggccagactgcaggataaacatcaatgagtgtcagtcttccccttgtgcctttggggccacctgtgtggatgagatcaatggctaccagtgtatctgccctccaggacatagtggtgccaagtgccatgaagtttcagggagatcttgcatcaccatggggagagtgatacttgatggggccaagtgggatgacgactgtaacacctgccagtgcctgaatggacgggtggcctgctccaaggtctggtgtggcccgagaccttgccggctccacaaagggcacggcgagtgtcccaatgggcagagctgcatcccagtcctggatgaccagtgtttcgtgcgcccctgcactggtgctggcgagtgtcggtcctccagcctccagccagtgaagaccaagtgtacatcggactcttattaccaggacaattgtgcgaacatcactttcacctttaacaaggagatgatgtctccaggtctcaccactgagcacatttgcagcgaattgaggaatctgaatattctgaagaatgtttctgctgagtattcaatctacatagcctgtgagccttccttatcagcaaacaatgaaatacacgtggccatttctgccgaagacatccgggatgatggaaaccctgtcaaggaaattactgataaaataatagatctcgttagtaaacgggatgggaacagctcacttatcgctgctgttgcagaagtcagagttcagaggcgccctctgaaaaacagaacagatttcctggttcctctgctgagctctgtcttaacagtggcttgggtctgttgcttggtgacagccttctactggtgtgtgcggaagcggcggcggaagcccagcagccacacccactctgcccctgaggacaacaccaccaacaatgtgcgcgaacagctgaaccaaatcaaaaaccccatcgagaaacacggagccaacacagtccccatcaaggattatgagaacaaaaactccaaaatgtcaaaaatcaggacacacaactcggaagtggaagaggatgatatggataagcaccagcagaaagtccggtttgccaaacagcccgtgtacacgctggtagacagagaggagaaggtcccccagcgcacgccgacaaaacacccgaactggacaaacaaacaggacaacagagacttggaaagtgcccagagcttgaaccggatggagtacatcgtatagcagacagtgcgtgccgccataggtagagtttgagggcaccccggggcttgtagtttctttaaactgttgtcgtatcccagtctgaggctgttgttgacttagagtcctgtgttaatttaagtttcgacaagctggcttccactggcactggtagtttctgtggttggctgggaaatcgagtgcagcgctcacagctatgcaaaaaccagtgaatgtgcccgggtgtacattcccctgcagccgactcgtcggctcccaggagctgcccaggcctaggcctcggagcttccacatctgccagcggtcctaatggtgatggcagccttaggatcatagttttatttatatttattgactcttgagttgtttttgtatattggttttatgatgacgtacaagtagttctgtatttgaaagtgcctttgcagctcagaaccacagcaactatcacaaatgactttattatttattttttttattgtatttttgttgttgggggaggggggatttgatgtcagcagttgctggtaaaatgaagaatttaaagaggaaaaatgtgtcaaagtagaatttttgtatagttatgtaaataattcttttttattaatcactctgtatatttgatttattaacttaataatcaagagccttaaaacatcattcctttttatttatatgtatgtgtttagaattgaaggtttttgatagtgttggaaacatatggctttttttttttttttttgtgaactttttctcattacgtgttgcctgtaagccaaaagtaaggtgtttggaaatagtttctcttggaaggatgggataggcttcttcccctgggaatactgatggattttttttttttttttttttttttgtacgacgtcaggtgttcaaacacttccttgatagcatcactttaagacacattctaaggactgactgaggcagattgagaattcgtctagaacaggtttttgtttttttctcttttctttttttattttttcctgctttagacttgaaaagagacaggcaggcgatctgtgacagagcagtttaagggaacaaactgagctatgtagtcagaatgtgactggttggatctcattaaaagtatcagattgtgtgaagttggaagcttaccaatcttactttgtaaattctgatttcttttcaccattcgtatgtaatgctgaaccacttgtagatttgatttcattgttgttgtctactgcatttagggagtattctaataagctagatgaatacttgaaccataaaatgtccagttagagcactgtttagattggccatagagtacactgcctgccttaagtgaggacatgaaagtgctattaccaagttcaagatcaaaaaaggcttataaaacagtcatcctggctcaccacggagcccaggaagatactttgtattgtcctattagtgttatatgaacataaaatacatctttgatgtgttgttcctggcaataaattttgaaaagtgatatttattaaattttttgtatg

SEQ ID NO: 758 - DNA, 3622 bp, Rattus norvegicus
cagcgtgagtgcgaggcggaggcggcggctgcagcggagcggacggtcgctcggcggcaggcactggtgtaatggataggtaacagaagaccacttcccttcctcctcagggcttcagcatgactgagtgcttcctgccccccaccagcagccctagtgaacaccgcagggccgagcacggcagcgggctgacccggacccccagctccgaggagatcagccctacaaaatttcctggattgtaccggacgggtgagccttcacctccccatgacatcctccacgagcctcctgatatcgtgtcagatgatgagaaagaccatggaaagaaaaaaggaaaatttaagaaaaaggagaaaaggactgaaggctacgctgccttccaggaagacagctctggagatgaggctgaaagtccttccaagatgaagaggtccaagggcatccatgtgttcaaaaagcccagcttctctaaaaagaaggaaaaggattttaaaatcaaagaaaagcccaaagaagaaaagcacaaagaagaaaagcataaagaggaaaagcataaagaaaagaaatgtaaagacttgacggccgccgatgttgttaaacagtggaaggaaaagaagaaaaagaagaagccaactcaggagccagaggtgcctcagacggacgccccgagtctcagacccattttcggcgctcccttggctgacgcagtagagaggaccatgatgtacgacggcatccggctgccagctgtcttccgggagtgcgtggactacatggagaagcacggcatgaaatgtgaaggcatctaccgagtgtcaggaatcaaatcaaaggtagatgagctgaaagcagcctatgaccgagaggagtctccaaacttggaagaatatgaacctaacactgtagccagcttgctgaagcagtatctgcgagaccttcccgagaatttgcttaccaaagagcttatgccccgatttgaagaggcttgtgggaggaccacagaggtggagaaagtgcaggagttccagcgcttgctcagggaactgccggagtacaaccatcttctgctctcctggctcattgtgcacatggaccacgtcatcgcgaaggagctggaaaccaagatgaacatccagaacatctccatagtgctgagcccaaccgtccagatcagcaaccgggtcctgtatgtgcttttcacacacgtgcaagagctctttggcaccgtggtcctgaagcaagtaacgagacctctgcgttggtccaacatggccacaatgcctacactgccagagacccaagcaggcatcaaggaagaaatcaggagacaggagttccttttgaactgtttacatcgagatctgcagggcgggataaaggacttgtctaaagaagaaagattatgggaagtacagaggattctgactgccctcaagagaaagctgagggaagctaaaagacaagagtgtgagaccaagattgcacaggagatagccagcctttcgaaggaggatgtttccaaagaagaaacgaacgaaaacgaggaggtcataaatatcctccttgcccaggagaatgagatcctgactgagcaggaggagctcctggccatggagcagtttctgcgtcgtcagatcgcctcggagaaagaagagattgaccccctccgagctgagattgcggagatccagagtcgccagcatggccgcagcgagacagaggagtactcctctgacagcgagagcgagagcgaggatgaggaggagctgcagatcattctggaagacttacagaggcagaatgaagagttagaaataaagaacaatcacttgaaccaggcagtccatgaagagcgggaggccatcgttgagctccgagtgcagctccggctgctccagatgctgcgagccaagtctgagcagcagctccaggaggaggaggagcccgagaggcgagggggcacaggcccactaccctgtgaaggtgtcctcgaggtgagagcagccaaggagcaggcgaagcctcgcccagcaaagaccggaaggagacgcccatctgaactgccccggccctgtgcatcgtactgtaagcgagagtccgctgcctgtcctgccaggcagcgttctgtgaaggctctcagagacgctcgctcttgcacacgtctgactccgtgtcaggctcaggtcctgggagagtgaaggggtggacactcgggggtggggggcttgcagggaacacaggtatttccagatagtgtcagcttatttgaaaattaattttctttgttaaaaataactattttaacccttgagtggcttctttttaaaccaaaaaactttttgcttttttttgttgttgtttaaatcacagcagaatcaggatctctttcttatcaaagggtgggaaccaaaccaggtcacttctgcgcctgccttgtggacgctcgtggtctcaccagccctgcagggtccctggccactcttgcttgtgccttccacaccttttggtgcagattgttcagtggggagctgcctcatattctctgactggccaaaaaggctctcgctggggttccctgtacctgccctgtgtgtaccactttgcttttccagctccgggtctgtcagtgtgagtcaggacggcccagtttggttgcagacggaggttaccatgcagcctgccaccagcctgggcagggcaggccacccactcactgccagggagcagcaagggcctcttctcagaggtggtcagagatgaccaccttgaccctgaggttgcacaggacacttctcacaccagggtccttttccacactgaccttccaggaaagtcaccttccacagtgacttcagttgctagcttgggctgggatacccacacctctgccaggataagccatgtagatgctgtcatgcacaactttcacctgtccatgtcatctcaaggggctgcttaaggactctgacagaactgagcggaaggaaggaaagcgtaactgtaattgaccccccctggtgtttgcctctaacctggacgactgctcccagcggtctgggaggccggactcttaggcaaccggatttcactgtcagatgagtggcccccagggaggtccccctgtggctctgaagacaaatcccacactctaaagtgagcgacaaacccacaggagggctccggtctactcctagttagtatttatttcagcacctgttggtgcgatttttcgttagcctctacctattgcactgttgtgacttgttggccattatttgatttttgtacggaaaaaaaagctttgttatagaaatcagcatactatttttttaaatctggagagaagatattatggaaactggaaacgtggtcaggtgtcaaatgtaaatgtataaatgccttgctgcacccgtcagatgtgcaacactcattctatatttgctggcaatattgaggaattctttttgtttgtgtaaactctaatttctatcaaggtatcatgggtttttaaaatttcattacaaatgtctcaatgttggttaactaatttttgccaggaccattattgattaaggaaataaactcagcagccatttgagaaaaaaaaaaaaaaaaaaaa

SEQ ID NO: 759 - DNA, 454 bp, Rattus norvegicus
tttttttttttttttttgcttcattcatctttggtaagacaggactgacacagcatacctggaagcttagtggggcagcccaaacctctacctcctgttgctgggggacgctgggctttacctcaggcttgtgtgggctcatgcagcccagagattctctggtggtctccaaacattgggagagaaacaaagtaacactctggatgaagtaacactattcatacccttgagtaggtcctgtgcctagtccctcttgacttcagtgctgtctgcagtgttaggacacatctgagggcaggcaggacccatggcagtcttacatactggtcccagcccttcctgccacactgagcttaggatgtcaaagctcttgggtcttacaggctggagctcccagtcttgatgccagatcctggctttgagtcccagcggcagatggggcaccctcgtgccg

SEQ ID NO: 760 - DNA, 2625 bp, Rattus norvegicus
tggacttgtactctctcctcggatggctagctgattacttctgtgtagtagcttacaaatgattcgaagtgttgaaactttctgagtctcaatgaactatttctcacacaactcagatactgctgttcatgcatgaattagttgaaccaggccacatagaaagcattgtaattgtacctgtgagttggcaagaagcaagtgctcttccttgattctgctgcacgaggaggagaatgggctgcgatcggaactgtgggctcattactggagccgttattggtgctgtcctggctgtgtttggaggcattctcatgccggttggagacctactcattgagaagacaatcaaaagggaagttgtccttgaagaaggaaccattgctttcaaaaactgggtgaaaacgggcaccactgtgtacagacagttttggatctttgacgtgcaaaacccagaggaagtggcaaagaatagcagcaagatcaaggttaaacagagaggtccttacacatacagagttcgttatttagccaaggaaaatataactcaggaccccaaggacagcactgtctcttttgtacaacccaatggagccatctttgagccttcactgtctgttggaacagagaatgacaacttcacagttctcaatctggctgtggcagctgcaccacatatctacacaaactcatttgttcaaggtgtgctcaacagccttatcaaaaagtccaagtcttctatgttccaaacacgaagtttgaaggaactcttgtggggttacaaagatccattcttgagtttggttccatatcctataagtaccacagttggtgtgttttatccttacaataacactgtagatggagtttataaagttttcaatggaaaggataacataagcaaggttgccataattgatacctataaagggaaaaggaatttgtcctattgggaaagttattgcgacatgattaatggcacagatgcagcctcctttccaccttttgttgagaagtctcgaacactgaggttcttttcctctgacatttgcaggtccatctatgctgtgtttggatctgaagtgaaccttaaaggaatccccgtgtacagatttgttcttccagccaacgcctttgcctccccactccagaacccagacaaccactgtttctgcactgaaaaagtaatctcaaataactgtacgtcgtatggtgtgctggacattggcaagtgcaaagaaggaaagcctgtgtacatttctcttccacatttcctacatgcaagtcctgatgtctcagaacctatcgaaggcttgaatcctaacgaagatgagcataggacatacttggatgtggaacccataactggattcactctacagtttgcaaaacgactgcaggtcaacatactggtcaagccagctagaaaaatagaagcactgaagaatctgaagagaccttacattgtacctatactgtggctaaatgagactgggaccatcggcgatgagaaagcagaaatgttcagaaaccaagtgaccgggaaaataaagctcctgggcctggttgagatggtcttacttggtgttggagtagtgatgtttgttgcttttatgatttcatactgtgcttgcagatctaagaatggaaaataagtagtggatgagcctacattatgcactagctacatttttggtaaaaccaatctccaaaacgaagacttaagacatgcttgtttttataaaacacacctatctgtagttgaagaaacggtggtgtgcgcgctctctctcttattgcagatatatatttatttatatattgcaataagccacagcatatttcgaaaagattaatatgtcactaagcctatattttttaataaaatcttgtattttgttaagtccatcatctgcaactgagtggacatcaatttctgcagaactaattatcttttttggttctgatttactgattttttttcctgttggcaaatttcaagaatgtatatattctaagaaacgctttgttcctcatcgaagtaaactgttatcatgtctggggtggccctttcatttatagcaaatgttccttgtgactgtcagcacatgatatgtcataaggattatatcattttaaagatttaaggatgaaaaatgaacaattcacatatgaaccattgttgatatattgtttaatcctctccctctctggtgtccttggcaacaacaaggccaggtatcacagatacttttttctttttactttcttacacagagcttatatgttctgttcctcgccatgaaatgaactatttttagcacattttagctctttattttaagtatgttgtcaagttccatgctgcctagctcttttgaaaactgagtaggtttttctctttctgctcagccgcaactaatgtaacttcagagagctgttatagtgttaaaagatgtaatttataataaatggattatgatatagaatcttaaaaaagctagaattggctttaaatatgtatttgtggtaatatattctgcttttataatcacccagaaataactggtttctaacattaaagatgttcttaaattcaaaaaaaaaaaaaaaaaaaaaaaaaaaaaa

SEQ ID NO: 761 - DNA, 314 bp, Rattus norvegicus
tttttttttttttttttgatataataagtatatttgagaagccagagctctggggatgacacgtatctcacacaggagacagaggagtcaaccccgagcccaattaggggaagggatttatagggaaaactacatggcctcagttcaactctaggccaccctgcttctggggcaagctgaccctagttcttgttttcctcagaactgttgtgtcaggccttatcgaggccagatggtttgtggtggctatagccaggctacctcaccaaaacatgtgatgctattcttttgggaggtgcacttgtcctcacagc

SEQ ID NO: 762 - DNA, 2495 bp, Rattus norvegicus
attgcctaccccgggtggagaccgtgctcgtccggccctcttgcctcacgttctgcagctctgcagctccgcaatcctacaccatggcggacagccgggacccagccagcgaccagatgaagcagtggaaggagcagcgggcccctcagaaacccgatgtcctgaccaccggaggcgggaacccaataggagataaacttaatatcatgactgcggggccccgagggcccctcctcgttcaagatgtggttttcaccgacgagatggcacactttgacagagagcggattcctgagagagtggtacatgcaaagggagcaggtgcttttggatactttgaggtcacccacgatattaccagatactccaaggcaaaggtgtttgagcatattgggaagaggactcctattgccgtccgattctccacagtcgctggagagtcaggctcagctgacacagttcgtgaccctcgtgggtttgcagtgaaattctacactgaagatggtaactgggacctcgtgggaaacaacacccctattttcttcatcagggatgccatgttgtttccatcctttatccatagccagaagagaaacccacaaactcacctgaaggaccctgacatggtctgggacttctggagtctttgtccagagtctctccatcaggttactttcttgttcagcgaccgagggattccagatggacatcggcacatgaatggctatggctcacacaccttcaagctggttaatgcgaatggagaggcagtgtactgcaagttccattacaagactgaccagggcatcaaaaacttgcctgttgaagaggcaggaagacttgcacaggaagacccggattatggcctccgagatcttttcaatgccatcgccagtggcaattacccatcctggactttttacatccaggtcatgactttcaaggaggcagaaaccttcccatttaatccatttgacctgaccaaggtttggcctcacaaggactaccctcttataccagttggcaaactggtcttaaacagaaatcctgctaattattttgctgaagttgaacagatggcttttgacccaagcaacatgccccctggcattgagcccagcccggacaagatgctccagggccgcctttttgcttacccagacactcaccgccaccgcctgggaccaaactatctgcagatacctgtgaactgtccctaccgtgctcgcgtggccaactaccagcgcgatggccccatgtgcatgcatgacaaccagggtggtgctcccaactactaccccaacagcttcagcgcaccagagcagcagggctcggccctggagcaccatagccagtgctctgcagatgtgaagcgcttcaacagtgctaatgaagacaacgtcactcaggtgcggacattctatacgaaggtgttgaatgaggaggagaggaaacgcctgtgtgagaacattgccaaccacctgaaagatgctcagcttttcattcagaggaaagcggtcaagaatttcactgacgtccaccctgactacggggcccgagtccaggctcttctggaccagtacaactcccagaagcctaagaatgcaattcacacctacgtacaggccggctctcacatagctgccaagggaaaagctaacctgtaaagcacgggtgctcagcctcctcagcctgcactgaggagatccctcatgaagcagggcacaagcctcaccagtaatcatcgctggatggagtctcccctgctgaagcgcagactcacgctgacgtctttaaaacgataatccaagcttctagagtgaatgatagccatgcttttgatgacatttcccgagggggaaattaaagattagggcttagcaatcacttaacagaaacatggatctgcttaggacttctgtttggattattcatttaaaatgattacaagaaaggttttctagccagaaacatgatttgattagatatgatatatgataaaatcttggtgattttactatagtcttatgttacctcacagcctggtatatatacaacacacacacacacacacacacacacacaccaaaacacacatacactatacacacacacacacacacacactaaaacacacatacacaacacacacatacactacacacacagaacacacaacacaaacatacacacataggcacacacacacacacacacacacacacacacacacacacacacacacatgaatgaagggattataaagatggcccacccagaatttttttttatttttctaaggtccttataagaaaaaccatacttggatcatgtcttccaaaaataactttagcactgttgaaacttaatgtttattcctgtgtagttgattggattccttttccccttgaaattatgtttatgctgatacacagtgatttcacatagggtgatttgtatttgcttacatttttacaataaaatgatcttcatgg

SEQ ID NO: 763 - DNA, 595 bp, Rattus norvegicus
cctgacaggatggcttcccttcgcctgttcctcctctgcctcgctggactgatatttgcgtctgaagctggccctgggggtgctggagaatccaagtgtcctctgatggtcaaagtcctggatgctgtccgaggcagccctgctgtcgatgtggccgtgaaagtgttcaaaaggactgcagacggaagctgggagccgtttgcctctgggaagaccgccgagtctggagagctgcacgggctcaccacagatgagaagttcacggaaggggtgtacagggtagaactggacaccaaatcatactggaaggctcttggcatttccccattccatgaatacgcagaggtggttttcacagccaatgactctggtcatcgccactacaccatcgcagccctgctcagcccgtactcctacagcaccactgctgtcgtcagtaacccccagaactgagggacccagcccacgaggaccaagatcttgccaaagcagtagctcccatttgtactgaaacagtgttcttgctctataaaccgtgttagcaactcgggaagatgccgtgaaacgttcttattaaaccacctttatttcattc

SEQ ID NO: 764 - DNA, 461 bp, Rattus norvegicus
caagaacaaacacctttattgtgggttccaggggagggaggtacgtggtggcactttaaccctgagtccagtccctgcagagcagtctgggacacaggctgtgggtcttgtttaggaggtggtctctggagctctgcagccaggcctgagttcggggacccaggtctttcaggtgatcttcatagtaggtctgcacgaagccctggatagctctggggccccagaaccaccgccatctgtccctggttctggtcaccagtggttccaccatctccatcaccctggctcttaccaggctccagcggctgttctcagggccaggagtgggggtcaagctttctgtaggcatggatgctacaaagcaggccaggaacagcacagagaggcagagtgatggcagggtctgctgcctgcatctcagcagggacatttctggggacttgggcctctgtgtctctgtc

SEQ ID NO: 765 - DNA, 520 bp, Rattus norvegicus
caggtttagcatcagtctttaatgctgtcacactgcataatgacaagtcacacactttggtcttgtgttggtagtggcaacttacaatgagtcgaatggtcagagcaccaggctagctccaaagaacagatccattccctccccaggtctgactcatcacagccctggacaggcagtagttgacagggactgctttcatccaagtgcacaccagctttgcatggaattataaaaacatatttacatacgttccacggtgctcctttcatcagaagcaaaggcccttttatcaaaagggattatatctagggctgtgcaaaattcaaaaggactgtatccttttgagaaagttgagtccattacacacacacatacacacacacaaaaaaagtcacctgcacctctgagaagtgccaggtgtggccaagggctacctctggaccagcaagtactgtgactgtaaggcagccatctgatttcaagagagccacaggtccaggggatctcctggctgtccagg

SEQ ID NO: 766 - DNA, 1714 bp, Rattus norvegicus
cctctgaggcgtttggtgctccggtagctaccagggctggagagcgagcattgccatggaaatatacacttcggataactactccgaagaagtagggtctggagactatgactccaacaaggaaccctgcttccgggatgaaaacgaaaacttcaacaggatcttcctgcccaccatctattttatcatcttcttgactggcatagtgggcaatgggttggtaatcctggtcatgggttaccagaagaagctgaggagcatgacagacaagtaccggctgcacctgtccgtggctgacctcctctttgtcatcacactccccttctgggcagtggacgccatggctgactggtactttgggaaatttttatgtaaggctgtgcatatcatctacaccgtcaacctttacagcagtgttctcatcctggccttcatcagcctggaccgctaccttgccattgtccacgccaccaacagccagaggccgaggaagctgctggctgaaaaggccgtctatgtgggtgtctggatccccgccctcctcctgactatccctgacatcatcttcgccgatgtcagccagggggacggcaggtacatctgtgaccgcctttaccccgacagcctgtggatggtggtgttccagttccagcacatcatggtgggtctcatcctgccgggcatcgtcatcctgtcctgttactgcatcatcatctccaagctgtcacactccaagggccaccagaagcgcaaggccctcaagactacggtcatccttatcctggctttctttgcctgctggctaccgtattacgtggggatcagcatcgattccttcatccttttggaggtcatcaagcaaggatgtgagttcgagagcgtcgtgcacaagtggatctccatcacggaggccctcgccttcttccactgttgcctgaaccccatcctctacgccttcctcggggccaaattcaagagctccgcgcagcatgcactcaattccatgagcagaggctccagcctcaagatcctttccaaagggaaacggggtggacactcttccgtctccacagagtcagaatcctcaagttttcactccagctaacacttacgcaaagacatatataatatatatatatatatatatatatgacaaagaactttttttatgttacacatttcccagatataaaagactgaccaatcttgtacagttttttttattgactgttggagtttatgtttctctagtttttgtgtgtgtgtgtgtgtgtgaggtttgacttaatttatataaatattggtttttttctgttgtttgtctgtttcacgtgaatgagtgtctaggcaggacctgtggccaagttcttagtcgctgtgtgtctgtgtgtaggactgtagagctgtagaggaaggaactgaacgctccagaatgtgtggtaaatcggataaagctagaagtgaccctcagctgtcgctgcataatctcttcgccccgcccaccccgttcctgaattgtttggttgtgctgtgtggtttctctgtagaagatggcacttaaaaccaaagcctgaaatggtatagaaatgctgggttttttctttcagttttcaagggtggattgatttcagtacctacaaatgtacagtcttgtattatgttgttaataaaagtcaatggtaaacttgaaaaaaaaaaaaaaaaaaaaaaaaaa

SEQ ID NO: 767 - DNA, 454 bp, Rattus norvegicus
aacctttccagtgagtttttattagtagttgcatcatgattcagggtcccagggtagggaccatcatatactgaggtcccccttttctatcggggagaaggtcaaagagcagaggagaggtgggcggagccaggtcagatcttcccaggaaatgtgccttctgctatgcggtcatcccaggctgagacccatgagacggggcagagggacttgtacactcgccggtaccactcgcacacggagacgtcaccgccctttgccgtcattgccttctcacagcggtggaagtccaggtagttctgccagcagttcttagtctggttctggtttgggaagcggctgtcaaagggggcggttttgtagttcttgattttagtcttgatgtcttcggccatcctgactcctaaagactgtcccggagcagcgttacttcaatgtgaccctttgcaaagac

SEQ ID NO: 768 - DNA, 447 bp, Rattus norvegicus
ttgtattcataaagtgctctaaacaagatgttctttttagcagttggggaaaaaggttctctaaaaggcatttaattcttagtggaaaaataatattaacaaaagccttgtgcgaatgtttgaatgacaatttgctcattttcttcatgaattggggtttgatagaaaatgcatatgtgtcactgaaagacagagtgatgggtctgtgtggttggaactcaaaatgacattgctctgtcagtgtgtgctgtgccggcttgatggctttgatgggggaggggtacacttggctggtggtacttccaaaggtgaatcttgctatgtagggttagtggtcagggcagccattcaggctgacagaaccttggacttctgtggcttctgtgatggggacagggacatggttgacttgaatattcttcagacagccaaaaaatgagttccaca

SEQ ID NO: 769 - DNA, 2318 bp, Rattus norvegicus
cggcggcggctcttcggtgcagagggggaaactccgcgggctcgtagaaagaataatgcggtacgaggcaggctgcttgctctggggtttggcagcagcggcggcagctcgagcagcggcacggcatcaccccagacgctgacagccccgccggccggctccctcactgactgccgactgtcaatggagctggaaaacatcgtggccaacacggtcttgctgaaagcccgggaagggggtggaggaaaacgcaaagggaaaagcaagaagtggaaggaaatcctgaagtttcctcacatcaaccagtgtgaagacctccggagaaccatagacagagattactacagtctatgtgacaagcaaccaattgggagactgctttttcgacaattctgtgaaaccaggcctggactggagtgctacattcagttcctggacttagtggcagaatatgaaattactccagatgaaaaccttggggcaaaggggaaggaaataatgaccaagtacctctctccaaagtccccagtcttcattgcccaagttggacaggacctggtctcccagacagagaagaagctcctgcagagcccctgcaaagaactcttctctgcttgtgctcagtctgtccatgactacttgaagggagaccccttccacgagtacctggacagcatgtattttgaccgttttctgcagtggaaatggttagaaagacaaccagtgaccaaaaacactttccggcagtaccgagtgctgggcaaagggggctttggagaggtttgtgcctgccaggttcgggccactggtaaaatgtatgcttgcaaacgcttagagaagaagaggatcaaaaaaaggaaaggagagtccatggcactcaatgaaaagcagattcttgagaaagtcaacagccagtttgtggtcaacctggcctatgcctacgagaccaaagatgcactgtgcttggttctgaccattatgaatggaggtgacctgaagtttcacatctacaacatgggaaatcctggctttgaggaagaacgagccttgttttatgcagctgagatcctctgtggcctggaagacttacaccgtgagaacactgtctatagagatctaaaaccagaaaacatcttgctggatgattatggccacatcaggatctcagacctaggactggctgtgaagatccctgagggggaccttatccgtggccgggtaggcactgttggctacatggccccagaagttctgaacaaccagcgatatggcctgagccctgactactggggcctgggctgcctcatctatgagatgatcgagggccagtcaccattccgaggccgcaaggagaaggtgaagcgggaagaggtggatcgccgggtgctggagactgaggaagtgtattcccccaagttctctgaagaggccaagtccatctgcaacatgctgctcaccaaagactcgaagcagaggctgggctgccaggaggagggggctgccgaggtcaagaggcaccccttcttcaggaacatgaactttaaacgcctggaggctgggatgttggaccctcccttcgttccagatccccgggctgtatactgcaaggatgtgctggacatagagcagttctccactgtgaaaggtgtcaacttggaccatacggacgatgacttctactcaaagttctccacaggctctgtgccaatcccatggcaaaacgagatgatagaaacagaatgtttcaaggagctgaatgtgttcggacccaacggtaccctctcaccagacctgaacagaagtcagcctccagaaccaccaaagaaagggctgttccacagactcttcaggcgtcagcatcaaaacaattccaagagttcacctactcctaagaccagttgtaaccaccgcataaattcaaaccacatcaattcaaactccactggaagcagctagtttcagctctggccttgaagtcaaaagtggaaccagctcagagccttctacttggaagcagaacttgtaaccaggggagctcccactgtggctcagtggccaggaaagctccactgggaaccaggataggatactgttcccccaataacaaacctccaagtttctcaaagaaatttccactcaggtctgttttccaaggtggccccaagctggggtggactagaattttccttgttgagcattgcaatagaaacacaatgggatatgacagcttgcacggattttaatagcatcccaactagaactgaattttgtctttattatttttaaaggaaagttttgtaaatttcaaaaaaaaaaaa

SEQ ID NO: 770 - DNA, 616 bp, Rattus norvegicus
atgttgcatggtgactttattgtgggtttccaaacctgaacaccagtcctcattcaggtccgctttgtcctataggaacacgaagcttcaactttaacttgaagagcatccgaggctgtaccctacaacgcctaatgggacccttgcagcctggcacgcaacattaaacgcctccgttaacataatcagcttggcatacaagaaaattcattcgcacagaccgaccagacacagcattcagagcgcttaccagttggtgggtggagccaccacacctagccctccaatgagaaagtgcacagaagagacttagtttgcatacgagacaatgcaacgctaataattgtagaccgtaacctagccagcataataagagttcacagctcatttttgatggtttgggggccctgaaaagggcctttgtgagtgggggagggggccaaggagaaggcctatacacacgaggacgccgatcaaccgccggagccatagagcgtgcggccctggcgcttgagcgcatacaccacgtccatagccgtgaccgtattgcgcttggcgtgctcggtgtaggtgacagcatcgcgaatcacattttcaaggaaaacctttatgacgc

SEQ ID NO: 771 - DNA, 5240 bp, Rattus norvegicus
cctcccctggggaggttcgcgttcccgtggctcgcgcctgctgcccgccggcctcgagaacgcgctctctcggccgcggcgctcacagtctccgccacccaccagctccagcaccagcagcagcgccggcgccaccgcccaccttctgctgtcgccgccgccacaaccaccttcccctccgctgtcctcttctgtcctcgcctcctgtcgattatcaggctttgaagcagcatggctgaaccccgccaggagtttgacacaatggaagaccaggccggagattacactatgctccaagaccaagaaggagacatggaccatggcttaaaagctgaagaagcaggcatcggagacaccccgaacatggaggaccaagctgctgggcatgtgactcaagctcgagtggccggcgtaagcaaagacaggacaggaaatgacgagaagaaagcgaagggggccgatggcaaaacgggggcgaagatcgccacacctcggggagcagccactccgggccagaaaggcacatccaatgccaccaggatcccagccaagaccacacccagcccaaagactcctccaggatcaggtgaaccaccaaaatccggagaacgaagcggctacagcagccccggctcgcccggaacccctggcagtcgctcccgtaccccatccctaccaacgccgcccacccgagagcccaaaaaggtggcagtggttcgcactccccctaagtcaccgtctgccagtaagagccgcctacagactgcccctgtgcccatgccagacctaaagaacgtcaggtccaagattggctccactgagaacctgaagcaccagccgggaggcggcaaggtgcagataattaataagaagctggatcttagcaacgtccagtccaagtgtggctcaaaggacaatatcaaacacgtcccgggcggaggcagtgtgcaaatagtctacaagccagtggacctgagcaaggtgacctccaagtgtggttccttagggaacatccatcacaagccaggaggtggccaggtagaagtaaaatcagagaagctggacttcaaggatagagtccagtcgaagattggctccttggataacatcacccatgtccctggaggagggaataagaagattgaaacccacaagctgaccttcagggagaatgccaaagccaagacagaccatggagcagaaatcgtgcacaagtcacctgtggtgtctggggacacatctccacggcacctcagcaacgtctcctccacgggcagcatcgacatggtggactctccacagcttgccacgttagccgatgaagtgtccgcctctttggccaagcagggtttgtgatcaggcccctggggccgtcactgatcatggagagaagagagagtgagagtgtggaaaaaaaaaaaaaaagaatgacctggcccctcaccctctgccctccccgctgctcctcatagacaggctgaccagcttgtcacctaacctgcttttgtggctcgggtttggctcgggacttcaaaatcagtgatgggaaaaagtaaatttcatctttccaaattgatttgtgggctagtaataaaatatttttaaggaaggaaaaaaaaaacacgtaaaaccatggccaaacaaaacccaacatttccttggcaattgttattgaccccgcccccccctctgagttttagagggtgaaggaggctttggatagaggctgcttctggggattggctgagggactagggcaactaattgcccacagccccatcttaggggcatcagggacagcggcagacatgaaagacttgggacttggtgtgtttgtggagccgtaaggcgtatgttaactttgtgtgggtttgagggaggactgtgatagtgaaggctgagagatgggtgggctgggagtcagaggagagaggtgaggaagacaggttgggagagggggcattgcgtccttgccaaggagcttgggaagcacaggtagccctggctgcagcagtcttagctagcacagatgcctgcctgagaaagcacagtggggtacagtgggtgtgtgtgccccttctgaagggcagcccatgggagaaggggtattgggcagaaggaaggtaggccccagaaggtggcaccttgtagattggttctctgaaggctgaccttgccatcccagggcactgctcccaccctccaggaggaggtctgagctgaggagcttccttttcgatctcacaggaaaacctgtgttactgagttctgaagtttggaactacagccatgattttggccaccatacagacctgggactttagggctaaccagttctttgtaaggacttgtgcctcttgcgggaacatctgcctgttctcaagcctggtcctctggcacttctgcagtggtgagggatgggggtggtattctgggatgtgggtcccaggcctcccatccctcgcacagccactgtatcccctctacctgtcctatcatgcccacgtctgccacgagagccagtcactgccgtccgtacatcacgtctcaccgtcctgagtgcccagcctcccaagcccaatccctggacccctgggtagttatggccaatctgctctacactaggggttggagtccagggaaggcaaagatttgggccttggtctctagtcctacgttgccagaatccaaccagtgtgcctcccacaaggaaccttacaaccttgtttggtttgctccatcaggcgtttggcgccatcgtggatggagtccgtgtgtgcctggagattaccctggacacctctgctttttttttttttactttagcggttgcctcctaggcctgactccttcccatgttgaactggaggcagccaagttaggtgtcaatgtcctggcatcagtatgaacagtcagtagtcccagggcagggccacacttctcccatcttctgcttccaccccagcttgtgattgctagcctcccagagctcagccgccattaagtccccatgcacgtaatcagcccttccataccccaatttggggaacataccccttgattgaaatgttttccctccagtcctatggaagcggtgctgcctgcctgctggagcagccagccatctcagagacgcagccctttctctcctgtccgcaccctgctgcgctgtagtcggattcgtctgtttgtctgggttcaccagagtgactatgatagtgaaaagaaaaagaaaaagaaaaaagaaaaaagaaaaaaaaaaaaggacgcatgttatcttgaaatatttgtcaaaaggttgtagcccaccgcagggattggagggcctgatattccttgtcttcttcgtgacttaggtccaggccggtcgagtgctaccctgctggacatcccatgttttgaagggtttcttcttcatctgggacccctgcagacactggattgtgacattggaggtctatacattggccaaggctgaagcacaggacccgttagaggcagcaggctccgactgtcagggagagcttgtggctggcctgtttctctgagtgaagatggtcctctctaatcacaacttcaagtcccacagcagccctggcagacatctaagaactcctgcatcacaagagaaaaggacactagtaccagcagggagagctgtggccctagaaattccatgactctccactactatccgtgggtcctttccaagccttgcctcgtcaccaagggcttgggatggactgccccactgatgaaagggacatctttggagacccccttggtttccaaggcgtcagccccctgaccttgcatgacctcctacagctgaaggatgaggcctttaaagattaggaacctcaggcccaggtcggccactttgggcttgggtacagttagggacgatgcggtagaaggaggtggccaacctttccatataagagttctgtgtgcccagagctaccctattgtgagctccccactgctgatggactttagctgtccttagaagtgaagagtccaacggaggaaaaggaagtgtggtttgatggtctgtggtcccttcatcatggttacctgttgtggttttctctgtatacccccatttacccatcctgcagttcctgtccttgaataggggtgggggtactctgccatatctcttgtaggcagtcagcccccaagtcatagtttggagtgatctggtcagtgctaataggcagtttacaaggaattctggcttgttacttcagtgaggacaatcccccaaggccctggcacctgtcctgtctttccatggctctccactgcagagccaatgtctttgggtgggctagatagggtgtacaatttgcctggaacctccaagctcttaatccactttatcaatagttccatttaaattgacttcaatataagagtgtatccatttgagattgcttgtgttgtggggtaaaggggggaggaggaacatgttaagataattgacatgggcaaggggaagtcttgaagtgtagcagttaaaccatcttgtagccccattcatgatgttgaccacttgctagagagaagaggtgccataaggctagaacctagaggcttggctgtccaccaacaggcaggcttttgcaaggcagaggcagccagctaggtccctgacttcccagccaggtgcagctctaagaactgctcttgcctgctgccttcttgtggtgtccagagcccacagccaatgcctcctcaaaaccctggcttccttccttctaatccactggcacatcagcatcacctccggattgacttcagatccacagcctacactactagcagtgggtaagaccacttcctttgtccttgtctgttctccagaaaagtgggcatggaggcggtgttaataactataggtctgtggctttatgagccttcaaacttctctctagcttctgaaagggttacttttgggcagtattgcagtctcaccctccgatggctgtagcctgtgcagttgctgtactgggcatgatctccagtgcttgcaagtcccatgatttctttggtgttttgagggtggggggagggacatgaatcatcttagcttagcttcctgtctgtgaatgtccatatagtgtactgtgttttaacaaacgatttacactgactgttgctgtacaagtgaatttggaaataaagttattactctgattaaacaaaaaaaaaaaaaaaaaaaaaaaaaaaaaaaa

SEQ ID NO: 772 - DNA, 3755 bp, Rattus norvegicus
gaattccttttttttttaatactagcaactttcattctttggaacttgtgctgaaaaaaagaagagtcagcaaatactactgaaagtgcaatattcgattatcactgcgagatgagctttgatccaaaccttctccacaacaatggacacaacgggtaccccaatggtacttctgcagcactccgtgaaactggggttattgaaaaactgctgacctcttatggatttattcagtgttcagaacggcaagctaggcttttcttccactgttcacagtataatggcaacctccaggacttaaaagtaggagatgatgtggaatttgaagtatcatctgaccggaggactgggaaacctattgctattaaattggtgaagataaaaccagaaatacatcctgaagaacgaatgaatggacaagttgtgtgcgctgttcctcacaacttagagagtaaatctccagctgccccgggtcagagtccaacagggagtgtatgctacgaacgtaatggggaagtattttatctgacttacacctctgaagatgtggaagggaacgttcagctggaaactggagacaaaattaactttgtaattgataacaataaacacactggtgctgtaagtgctcgtaacattatgctgttgaaaaagaaacaagctcgctatcaaggagtagtttgtgccatgaaggaggcgtttggctttattgaaagaggtgatgttgtaaaagagatattctttcactatagtgaatttaaaggtgatctagaaaccctgcagcctggagatgacgtggaattcacaatcaaggacagaaatggtaaagaagttgcaacagatgtcagactattgcctcaaggaacagtcatttttgaagatatcagcattgaacattttgaaggaactgtaaccaaagttatcccaaaagtacccagtaaaaaccagaatgacccattgccaggacgaatcaaagttgactttgtgattcctaaagaacttccctttggagacaaagacacaaaatccaaagtgaccctgctggaaggtgaccatgttaggtttaatatttcaacagaccgacgtgacaaattagaacgagcaaccaacatagaggttctatcaaatacatttcagttcactaatgaagccagagagatgggtgtgattgctgccatgagagatggttttggcttcatcaagtgtgtggaccgtgatgctcgtatgttcttccacttcagtgagattctcgatgggaaccagctccacattgcagatgaagtggagtttactgtggtccctgatatgctctctgcccaaagaaatcatgctattaggattaaaaaacttcccaagggcacggtttcattccattcccattcagatcatcgttttctgggcaccgtagaaaaagaagccactttttctaatcctaaaactacaagcccaaataaaggcaaagacaaggaggcagaagatggcattattgcttatgatgactgtggggtgaaactgactattgcttttcaagccaaggatgtggaaggatctacttctcctcaaataggagataaggttgaatttagtattagtgacaaacagaggcctggacagcagattgcaacttgtgtgagacttttaggtcgtaattctaattccaaaaggctcttgggttatgtggcaactctgaaagataattttggatttattgaaacagctaatcatgataaggagatatttttccattatagtgagttctctggtgatgttgatagcctggaactgggagacatggttgaatacagcttgtccaaaggcaaaggcaataaagtcagtgctgagaaagtaaacaaaactcactcagtgaatggcatcactgaggaagcaaatcccaccatctactctggtaaagtcattcgtcctctgagaggcgttgatccaacacagattgaataccaaggaatgattgagattgtggaggagggggatatgaaaggtgaagtgtatccttttggcatagttgggatggccaacaaaggggattgcctacagaaaggggagagtgttaagttccagttgtgtgtacttggccaaaatgcacaaactatggcctacaacatcacaccccttcgtagggctactgtggagtgtgtgaaagatcagtttggctttattaactatgaagtaggagatagcaagaagctctttttccatgtgaaggaagttcaggatggcattgagctacaggcaggagatgaggtggaattctcagtgatccttaatcagcgcactgggaaatgtagcgcctgtaatgtttggcgagtctgtgaaggccccaaagctgttgcagctcctcgacctgatcggttggttaatcgcttaaagaacatcaccctggatgatgccagtgctccacgtctaatggttcttcgtcagccaaggggaccagataactcaatgggatttggtgcagaaagaaagatccgtcaagctggtgtcattgactaaccacgtccacaaagcacatcattaatccactatggtcaagttggggggattctggtgaagggttctgaatatcttcctcttcatccctcccaaaatctggaatacttattctattgagctattacaccagttttaacaccttcctcgtgttatgtttaaagaaaaaataaataaatttaagaaaccattttaaaattatgcacagttgcagcctggaaaacttaaggtggcgccttatagtgtcaatttaggagctttatttggtgcatttaacgcaactggtaattgcaaattccacttggcctgtgtaagtgaacaaaacagactgttactttgttggccctatgaaattctgcactctagtcagtatatatactctaccttcatgacttaatactcagctgcattcttttccttttttccctctgttcattatgctttaattctgaggaccatatgaaggtagaatatattacctttaaaaattgcaaaatttatatagcaaacgattttcttaagttgatggccaaatgttaaaatgttattttcatatcatttataatcttgtcacaatccacttaacgaagtttgattacatttcagtgaaaattatcttccataataggttttttttttccttcctgggatggggggcaaataactttactacaattagtatgtatggtgcagaatttcatgcaaatgaagtgtgccagcagtgtgataatttaaacatatttaaacaaaagacgaatgcacaaaattgctgctgcttagatcactgcagcttctaggacccagtttcttttactgatttaaaaacaaaatgaaaaaaaaataataaaaaagttgtgcctgaaatgaatcctgttttttttataagtagccccctggttccagtgccctgttgaatacaggcacttgatccttggtgcagcttctgttcaactttgtatcacgggaacggattggcctgatttcttggccttcctcttgaattggccccaaacagggtccctggcaagtggagtgaaggctttttgtctaaagatgacaagggtcagctcaggggttgtgggggagggcgttttcatcttccccgttgtcacttgaggttttgaactctgggtaaagaggccgtttatctttgtaaacacaaaacatttttgctttctccggtttcatgttaatggcgaaagaatggaagcgaataaagttttactgatttttgaaaaaaaaaggaattc

SEQ ID NO: 773 - DNA, 3046 bp, Rattus norvegicus
tttcccgagaagcggcagggacctcggcctccagcttaccgggcggatcgaagcagcggtcgggatggtactgctgggcttgctgcagtcaggcggctcggtgctcgggcaggcgatggagcaggtgacaggaggcaacctgctttccacgctgctcatcgcctgcgccttcacgcttagccttgtctacctgttccgcctcgcagtgggccacatggtccagctgcccgctggagcgaaaagtccgccatatatttactctccaattccgttccttggccacgcgatagcatttgggaaaagtccaattgagttcctggaaaatgcatatgagaagtacggacctgtgtttagctttaccatggtgggcaagactttcacttaccttttggggagtgacgcagccgccctgctcttcaacagtaagaacgaagacctgaatgcggaagaggtctacggtcggctgacaacgcccgtgtttgggaagggagttgcatacgacgtgccaaatgcagttttcctggaacagaagaaaatactaaaaagcggccttaacatagcccacttcaagcagtatgtttctatcattgaaaaagaagcgaaggagtactttaaaagttggggagaaagcggagaaagaaatgtgtttgaagcgctgtctgagctcataattttaacagctagccattgcttacatggaaaggaaattagaagtcagctcaacgagaaggtggctcagctgtacgcagacctggatggaggctttagccatgccgcctggctgttgccaggctggctgcccctgccgagtttcaggcgcagggacagagcccatcgagagatcaagaatattttctacaaggccatccagaaacgtaggctgtcaaaagaaccagccgaggacattcttcaaactttactggattctacatacaaggatgggcgtcctctgacggacgacgagatcgcagggatgctcatcggactgctgctggccggacagcacacatcctccaccaccagtgcctggatgggcttctttctggccagagataaaccacttcaagacaaatgctacttagaacagaaaacggtgtgcggggaggatctgcctcccttaacttatgagcagttgaaggatctgaatttacttgatagatgcataaaagaaacactaagactgaggcctcctataatgaccatgatgagaatggccaagacccctcagactgtggctgggtacaccattcctccaggacatcaggtgtgtgtttctccaactgtcaatcaaagactgaaagactcctgggtagaacgcttggacttcaatcctgaccgctacctacaggacaacccagcgtcgggagagaagtttgcctatgtgccgtttggagccgggcgccatcgttgtattggagaaaattttgcctatgttcaaattaagacaatttggtccactatgcttcgtttatatgaatttgacctcatcaatggatattttcccagtgtgaattatacaacaatgattcataccccagaaaacccagtaatccgttacaaacgaagatcaaaatgaagaaaggaacaaggagccagtgtggagacgggactgcaagctgcagcttggcagagaatgaagctttgacacagctttcatactgtactgttttttaagtgtgtggttctgaaagccagtttgattttaatgttttattaactcggtgatttttgtcagacctaatggcatttgaaacagttataatagttctgataggatttcagggaagccaagtttatgttagaaatcgtttaggggagcctcggtattcagagatgatacagaatatagcatccaggtaactaacttcagaagcacacgttgccgtagggagattccggcttggaactagtttgggaagttttaagcctggtcagatgctacagaggcaatgggtcattggtgtggttgggccacttctgtgcgtaaagatgtgagagggtgaaggataagttttctgcgaagctctagatggtgtgagtgccctttgtagtgttaactgagagcaccactccagcgagatggcagcaatcttggaccttatcttgataaccttatttcctaaaaataataaatactaaagagtacttatgttattggttccagaaaaatccaaaatcaaatccttgtggaatttttaattttaattaaaaaaaaaaaaacaagtaccatgattttaaaagtgtatgattctgagcttagtgaattctggccttgagattgaggaatggggacatggtatcattgcccgtgttctttggaggctgtgctcaggagccaacctaacagattgttaccatgggcctaattctgacctgcccataatctgtattaggaatcaagagatctgttgctgggtgtggtgctgcacacctgtaatactagtgctcgggctgaggcaggaggattgagagtttgaggccaacctaggctacatagcaagacttaacaccctccccaaaataaaaccttttttctctaaagtatgtgtactggctggtcttaggtgacaacctgacacacgctagggtcatcagagaaaagggaacctcagttgaggaaatgctgtaaggatgcttagtggtcaatgagagagggcccagcccactgtgggtggttccacccctaggctggtcatcctgggtcctaagaaagcaggctgactaagacaccaggagcaagacagtaagcagcatccttcatggcctctgcatcagctcctgccttaggttcctgacccgcttgagttcccgtcctgactttctttgataatgaacagtagtatggaagtgtaagccaaataacccacccccaccctcccaacttgctttttgctcatggtgttttgtagcaatagaaaccctaactgttacagctgtaagaggcttttgaagactcttcaaatgaaggcccaaatctctgctgttaaaggtttcagattaaaattctctatgagaaaaaaaaaaaaaaaaaaaaaaaaaaaaaaaa

SEQ ID NO: 774 - DNA, 2201 bp, Rattus norvegicus
ggtggagtagcggtttccttagtggctttgtgaaggtgttcactgcagagactggttgcagaattcagctacgatggggaacgtttttgaaaagctgtttaaaagcctatttgggaaaaaggaaatgcggattctcatggtgggcttagatgcagctggcaaaacgacgatcttgtacaaactgaagctgggagagattgtgacaaccatccccaccataggtttcaacgtggagaccgtagaatataaaaacatcagcttcacagtctgggatgttggtggccaggacaaaatcagacctttgtggcgacattacttccagaacactcaaggtctgatattcgtggttgatagtaacgacagagagcgggtcaatgaggcccgggaagaactgaccagaatgctagcagaagatgagctcagagacgcagtcttattggtgtttgtaaacaaacaggatcttcctaatgctatgaacgcagcagagatcacagacaagcttggcttacattcacttcgccagagaaactggtacattcaggctacctgtgcgaccagtggagatgggctttacgaaggcctggactggctctccaaccaactcaagaaccagaagtgatcagaagcagcccattccccatgccttgtggcaaaggcagctggcctttcccgtgtgcatgtgagtgcgtgaggagccatgtggccgtgtggctgggagtggggcagctttctcacaccgtgccttatccacgctatacgaacaccagtactccattttaagaaaaccagtgttacatttggaatgctaccgtccatttcacgagctttgatggtcttttcgctgaggcctccccggtgtgatagccagaatatctctaggctggaaaagaagagagctggaggcaggcaggtcccgttgttgccatcctgggtttggcctctccacacactcggaatcccgttggactttggtgtccttttacaaaaagaaaggaagggctgccattctttccattgtgccaaagctagcagctcacttgtagtgctttaaagctgtcaagaagaaggatacgttattaccacagtgtgagaggttcagaggggaatacttccccagagttctgttagttcaaactgacgcatttagctgttttagtccaaggaatcagtgacctttttcattagagtatcaagactgtaacactagagaagtttccagcctgtcccatacttgccaaacggaaactctgtgggctgctggcccaacaggaggccagaactcttcccctaagcctcctggtccacagcggagtaaaggttgtggggagtgaagtgaggtagctcttgtgttctggcatcacgtctcagtcccctgaggctgctgctcccacttctctgctctgtgctgagtgttcttcacatgcagcagacagtgctcctggtggagttgtcactgtgtccccttgtcctggtctactgtgggcttttgattagtatctgtttccagaaccgcacacccgtgagttctgagtgtgtgtgagaaagtcaggaggttaatttagaagatgaaggtcccagtggcccccatactccctgggttggtgctaaactttgctctgagaagcgccttttcttcagactgctctcactctccctcatcaatggcagtggcatctgaagagcagcttggatatgtgtgctgtgtcgtcctgcagatagttgataggaaggcccagagaggagctggcttcagccctaagcccttctggccacatagctctgggccacatttgtacctaagcccctttactgcttaatgttttaaaactcctttcagaaaaaaattaacccctgctacagaagggggaatgcaaactgaacttcaaataaatcttgttcattggtaacaaagttaagctaggaaaaaaaattccatgccattgtaaatgtgagctgtgatgtttttctttaaaatatcttgaatgttcattgcaatactggtgactgagtccagatgtgatttttaacgtcagatgaattcctgagaaatgtttaagttgtacacctcccattggctgggagcctcttgccctttgtaattatgcttagtgtgcctggcctggtgctaggctgcagtaaacctggtgactggttagataataaagaacttacttgggaaaaaaaaaaaaaaaaaaaaaaaa

SEQ ID NO: 775 - DNA, 1576 bp, Rattus norvegicus
tccgaaccgcacctcatgggttccgacgtgcgggacctgaacgcgctgctgcccgccgtgtcctcgctgggcggtggaggcggctgtgggctccctgtgagcggcgcgcggcaatgggcgccggtgctggacttcgcgcctccgggcgcctcggcttacgggtcactgggcggtcccgcgcctcctcccgctccgccgccacctccgccgccaccccactccttcatcaaacaggagcccagctggggcggcgccgagccgcacgaggagcagtgcctgagcgccttcaccttgcacttctccggccagttcaccggtacagccggggcctgtcgctacggacccttcggtcctcccccgcccagccaggcgtcatccggccaggccaggatgttccccaatgcgccctacctgcccagctgcctggagagccagccctccatccgcaaccaaggatacagcacggtcactttcgacggggcacccagttatggccacacgccctcgcaccatgcagcgcagttccccaatcattccttcaaacacgaggaccccatgggccagcagggctcgctgggcgagcagcagtactcggtgccacctccagtgtatggctgccacacccctaccgacagttgcacaggcagccaggccctgctcctgaggacgccctacagcagtgacaatttataccagatgacctcccagcttgagtgcatgacctggaaccagatgaacctcggagctaccttgaagggaatggctgctgggagctccagctcagtgaaatggacagaagggcagagcaaccacggcacagggtacgagagtgagaaccacacaacccccatcctctgtggtgcccagtacagaatacacacccacggtgtcttccgaggcattcaggatgtgcggcgcgtatctggagtggccccaactcttgtccggtcagcatctgaaaccagtgagaagcgtcctttcatgtgtgcgtacccaggctgcaataagagatattttaagctgtcccacttacagatgcacagccggaagcacactggtgagaaaccataccagtgtgacttcaaggactgcgagagaaggttttctcgctcagaccagctcaaaaggcaccaaaggagacacacaggtgtgaaaccattccagtgtaaaacttgtcagcgaaagttttcccggtccgaccacctgaagacccacaccaggactcatacaggtaaaacaagtgaaaagcccttcagctgtcggtggcacagttgtcagaaaaagtttgcgcggtcagacgaattagtccgccatcacaacatgcaccagagaaacatgaccaaactccacgtggcgctttgaggggtccgacccggagacagtccagcgtcccaggcaagaaagtgtgtgcttaaactgcttccaaatctgattttgaaattcctccctctcacctacaaaaggacatgatggtggatcttcatccgacttccaagacagcacacctgtttactgagtcctatcaggtttgccggaaggagtcggtctctgcccactcttgattaactcccaggcc

SEQ ID NO: 776 - DNA, 2524 bp, Rattus norvegicus
ggcctaggcttgccgtgcgagtcggacgtggtccgggcccaccctgctctgtactactactcggctttctcgtcaagatgcctgaggaagtgcaccatggagaggaagaggtggagaccttcgcctttcaggcagaaattgcccagctgatgtccctcatcatcaacactttttactcaaacaaagagattttcctccgggagttgatctctaatgcttctgatgccctggacaagattcggtatgagagcctgactgacccttccaagttggacagcgggaaagagctgaagattgacatcatccccaaccctcaggaagccacgctgactttggtggacacaggcattggcatgaccaaggctgacctcataaataacttgggaaccattgctaagtctggtacaaaggcgttcatggaggctctccaggctggtgcagacatctccatgattgggcagtttggtgtcggcttctactctgcctacctggtggcagagaaagtggttgtgatcacgaagcacaacgatgatgagcagtatgcctgggagtcttctgctggtggatccttcactgtccgtgcagaccacggtgagcccattggccggggtaccaaagtgatccttcacctcaaagaagaccagacagagtacttagaggagaggagggtcaaggaggtggtgaagaaacactcacagttcataggctaccccatcaccctctatctggagaaggaacgcgagaaggagatcagtgatgatgaggcagaggaagagaaaggggagaaggaggaggaagataaggaggatgaggagaagcctaagattgaggatgtgggatctgatgaggaggatgacagcggcaaagataagaaaaagaaaacaaagaagatcaaggagaagtacattgaccaggaagagctgaataagacgaagcccatctggaccagaaatcctgatgacatcactcaagaggaatatggtgaattctacaagagcctcaccaatgactgggaagaccacttggcagtcaagcacttctctgtagaagggcagttggaattcagggcattgctcttcattccccggcgagctccctttgacctctttgagaacaagaagaagaagaacaacatcaaattgtatgtccgtcgtgtgttcatcatggacagctgtgatgacctgatacctgagtacctcaacttcatccgtggtgtggttgattccgaggacctgcctctgaacatctcccgagaaatgctccagcagagcaagatcctgaaagtcatccgcaaaaacattgtgaagaagtgccttgagctcttctctgagttggctgaagacaaagagaactacaagaaattttatgaggcattctctaagaatttaaagcttggaatccatgaggattccactaaccgtcgccgcctctctgagctccttcgctaccatacctctcagtctggagatgagatgacttccctgtcagagtatgtgtctcgcatgaaggagacacagaagtccatctactatatcactggtgagagcaaagagcaggtggccaactctgccttcgtggagcgtgtgcggaaacggggctttgaggtggtatacatgactgagcccattgatgagtactgcgtacagcagctcaaggagttcgatggcaagagcctggtctccgtgaccaaggagggcctggagctaccagaggatgaggaagagaagaaaaaaatggaggagagcaaggcaaggtttgagaatctctgcaagctcatgaaggagatcttggacaagaaggttgaaaaagtgactatctccaataggcttgtgtcttccccctgctgcattgtgaccagcacctacggctggacagccaacatggaacggattatgaaggcccaggcactgcgggacaactcgacaatgggctacatgatggccaagaaacacctagagatcaaccctgaccaccccattgtggagactctgcggcagaaggctgaggcagacaaaaacgacaaagctgtcaaagacctggtggtgctgctgtttgagactgctctgtcttctctcgcttctcactttaggaggcccaaaacccactccaaccgcatctaccgcatgattaaactaggcctgggcattgatgaagatgaggtcactgcagaagagcccagtgctgctgttcccgatgagatccccccactggagggtgatgaggatgcctctcgcatggaagaagtggattaaaggctcctgggaagcccccgccctctgtatagtatccctgtggctcccccaacagccttgactggccctgacccacctgggctctctctgctcatgtctacaagaatctcttctatcctgtccttgtgccttaaggcaggaagatcccctcccacagatagcagggttgggtgttgtgtattgtgtttttttgtttgttttattttgttctgaaattaaaagtatgcaaaataaagatgatgcagttttaaaaaaaaaaaaaaaaaaaaagg

SEQ ID NO: 777 - DNA, 569 bp, Rattus norvegicus
cctcactatagggaataagcttgcggacgctaaagttttttttttttttttttttttttttttttagtattactttgacttgtgagtctaggttaaaatcattcggaggattttttattctccgaggtcaccccaaccgaaattttttagttcatatttattttgttttagcccattaggttgtttttatataagttgaactagtaaattgaagctccatagggtcttctcgtcttattgggagattccagcctcttcactggaaggtcaatttcactgattgaaagtaagagacagttgaaccctcgtttagccattcattctagtccctaattaaggaacaagtgattatgctacctttgcacggtcaggataccgcggccgtttaactttagtcactgggcaggcaatgcctctaatacttgttatgctagaggtgatgtttttggtaaacaggcggggttcgtgtttgccgagttccttttactttttttaatctttccttaaagcacgcctgtgttgggctaacgagttagggataagtaattttattgttgggttagtaccta

SEQ ID NO: 778 - DNA, 4431 bp, Rattus norvegicus
attcagcccgctccccgagcagccttagccatccctaactaatccaactgcttcccagtctgcgggtgctgggctcggtgctgagaagaggctctggctcttggctattgtcaggtcaaacactaagactgtgtccatgttagaactcatagaagttaatggaacccctggcagtcagctctccactccgcgctccggcaagtcaccaagtccatcgcccaccagcccaggaagcctgcggaagcagaggatctctcaacatggcggctcctccacttcactttcatccacaaaagtctgcagctcaatggatgagaacgatggccctggggaagaagagtccgacgaaggtttccagattcctgccacaataacagagagatacaaagtcgggagaacaataggagatggaaatttcgctgttgtcaaggaatgtatagagaggtcgactgctcgggagtatgccctgaaaattatcaagaaaagtaaatgccgaggcaaagaacacatgatccaaaacgaggtctccatcttaaggagagtgaagcatccgaacattgttctcctgattgaagagatggatgtgccgactgaactatatcttgtaatggagttagtaaagggtggagaccttttcgatgccatcacttccactagcaaatacacagagcgggatgccagtgggatgctgtacaacctggccagtgccattaaatacctgcacagcctgaacatcgtccatcgtgacatcaagccagagaacctgctggtgtatgagcaccaggatggcagtaagtcactcaagttgggtgactttggcctggccacaattgtcgatggccccctgtacacagtctgtggcaccccaacttatgtggctccagaaatcattgcagagactggatatggcctcaaggtggacatctgggcagctggcgtgatcacttatatcctgttgtgtggtttccctccattccgtggaagtggggatgaccaggaggtgctttttgaccagatcttgatgggccaagtggactttccatctccgtattgggacaatgtgtcagattctgctaaggagctcatcaacatgatgctgttggttaacgtggaccagagattttcagccgtgcaagtccttgagcacccctgggttaacgatgatggcctcccagaaaatgaacatcagctgtcagtagctggcaagatcaagaagcatttcaacacgggccccaagccgagcagcacggcagctggagtttctgtaatagcaaccaccgctcttgataaggagaggcaggttttccgacgaagacgcaaccaggatgtgaggggccggtacaaggcacagccagctccaccagaactcaactcggaatcagaagactactcccccagctcctctgagactgtccgctcccccaattcgcccttttaataagaccccttcactcgaagtcctagcttaaccctttaagactctgagattccccctccccccaaacttctgtaaaacaggttcatctgatctacctagcactcagtgctgaacggcagaacagaaagtatatttcgggtacctttgtagcaagttccctttactgaatgagaaggcatgtggtgtttgtgacaacggtaatttgctgctaataggggtccttaaagggttgaggctaatttgcgattttttttcttttaacatagaagtaacgaatgttttcatcagtcagactaggatctgcagtatgtaacatagcacatgttagccctctgagtgcatagaatttgcttgagaatccttgctggggaatttttcagacccttgagtgtattcacacatatttcttgattttactgcagaccaaggggcgtcattgagacccaaaatgtccacccaagaagagtattggggaatgacacattgccaattcttctcagtgggcttagacaatgacgggttctacagcatcagcagatgcacccctccttcttagccatcttatgaagaagggaagtccctttccctacatagtaagctgcagagccttctctgctctgattggagggagttaaggtttgtggctgcctatcccaagtgatcgacagtgtctctccctgtctccattcactgctgtgctgaaggcgcccctgaaatgctgcttccccattagctgctgctagtgccaggcagaccctcggggaaccacctagccttggcttgtgctcggtgagttgggatctgtctgctcagggtcagaagagctctagaaacaactggtgagaagagcaataaattatcaggtgctctacggggccgggaatcaaccggcaaggaaaagcaaggctctgtgttgttgttgttgtcattttcttttctcagctgcttttacacaggaccatagccaccagtgcgaaaccaacacagaatggaaaagacccgacccggggcatgtgagagcaagaggcaagtgctttgcaaagaggctgaaaggaaaatacagagaaaacacaatccaaaaggttctaaaatgggattcctagaaccaaacagattccatgagtaactctaggtaccaggaagtcagttccagcaagtctcccagaagatacctcagaggctgaagccaccactcccactcatgattttctttactttatttagcatggtctctagtcctccaggagggatgtgttgcttttctggtttggggccaagcctggctgggattgggttttcactcctgttaggcaatctgtctcggaggcctgggtttccttgggagcccattgtttcagaatgtaggcttgtgcttccttttccttacttccctgctccactgggatgcaggagtgtgtgggagggtgtgggaggcaaggcccaacccaagcgttgccctaatgttttctcagctttgactcaagagagaacaattttaaactccagggtggctacaagttccttatttgctcattactgctttgaatgtatttcaatgtcctgaaagtcatgaacaaccttcccatagtcaggtcgagatatttccgaactccacactgatctgcagctgctgtgtttatacatagtcattaaactatgttcctcacacatgtagatttttaaataacagaatcccatatttcctgctcatttaaatataacatttatttagttttttttccttttttgggagtccagaaatgatacacataaattcacaaaatgctataaatccatatattatttgaattgggtgctgggactagagacagggcacagaccaccaggaaggatgtcgatttgtagatagagtccatataggtaaaggacaagaactgctctaaaattgctactttctctggaacggaaaagcaaagcgctattctaagatcagcgagcaatggcatggctgagccttggctccacgtgtgtgactataaaacaccctacggccaatagcagattgccactttccttgttctgaattactgctttccccggtcattaacgtagccacagcgtccaggggttacaggaccaaagtgcaaggctctggaatttttccatcaacattctctcatcacgaagaagggcagctcagaagaattcagagcccattcagaaggacgatcgcagcacatccctatagaatttcagtgatcaacgctgaataagtagcggaatgtaacctgtcaagtagaaatattgagcaatcagacggaatgcagtaattcaagagtcttgccagtgtggagccaccaagatcttagacgtcagagttgtaactcagagggcgaagggacagcacacactgaagactgggtgcatccagattgctttgctttcagtcaacacggatatcctccccctcaacattcccagaatagctccagtttgaaataattaagtggtggtgttctttgaatttctataaccaatcaatcttattttttattttgtgtatcatagaacaactatgtgccactatggctgtgtgtcgccgtaattctccactgaactatcatgactgtttgcctatctttgagtattgaatataactcttatggtggtagtctggtgatgggacttgcccttccttaccaacaagaccagtcttgtggtattggaaggggtctttcggtttgagagtagagtagttgaacactccttcattacttgcttcctgtaaatcaattctgtagatgagaaccattatactaatgagtacatttccccctcaacattgtagaaggaaccactttatttgtcatgatcaataaatatgtgaattgttccaaactgttagaagaaaacgttaaggtcttcagtccctgggaatgctctgactgtagccccccgctaacccacacgtggtggtggtgtgtattaatatgagtccaggggaaatatgaataaacgacggaaaacacttg

SEQ ID NO: 779 - DNA, 320 bp, Rattus norvegicus
cagctttgaaccctgaaactgcttgtggcaggttcagttactgacagcacaaattccattgagtctattcaaggattgaatgacttcacaagccctggtctcaggagattaactttcatattggggtagtggttcacttgagaatacaaaatcttcagattaactgatgtccaaaatactgtcttaaatcatgagatccatcaatttttagtattgtctagacctgcaaatagaattacattgtaaaatctttttcagcatgtgttaagatgtatgtgaaatttttttgtttaagtgtaaacttcataccatactgtcag

SEQ ID NO: 780 - DNA, 472 bp, Rattus norvegicus
acatacttgatgaaggtgcttcccttaaacattctctccagcggaaaacagagcatggagagcagcttctagctgctctgctcagggcctgggctcctccttgcccaaatggtgaggcggaggggtgtacttcccctctttcatcagcttctcccgctgtttcttgatttcatgcatccgccttatcgttttgaaccgaagaaagcattcttcaaagtcttcatactctatcttgcactcttttttagcccgggtagcaccgatcccatgtgcgcattctatccactccttttcaaatgcgtggcatcgagcggcattcttgtaaggctgctcagcacttaggaatataaagtgtcgatctaggctaatgcccagccttttctgcacatgaaggaaaggcatgacttcttggctgaccggacacagcaagcgcctaccgcacctcagcaatgcccttctcaagtccctgggc

SEQ ID NO: 781 - DNA, 1088 bp, Rattus norvegicus
gcgcccgccgccgcgctctgtatgccgcgttcccccggcgcacccgccgccgatagtctgagccggaggagtcgccgccgctgcggttgatgtggttgggccggggctgaccaggctaccaagatgcctcagtccaagtcccggaagatcgccatcctgggctatcggtctgtgggaaagtcctcattgacaattcagtttgttgaaggtcaatttgttgattcctacgatccaaccatagaaaacacattcaccaagctgatcacagtaaatgggcaagagtatcatcttcagcttgtagacacagcagggcaggatgaatattccatttttcctcagacatactccatagatattaatggttatattcttgtgtattctgttacatcaatcaaaagctttgaagtaattaaagttatccacggcaagctgttggacatggtggggaaagtgcagataccgattatgttagtcggaaataagaaggacctgcatatggaaagggtgatcagttatgaagaaggaaaggctttggcagaatcttggaatgcagcttttttggaatcttctgcaaaagaaaatcagactgctgtggatgtttttagaaggataattttggaagcagaaaagattgacggagcggcttcacaagggaagtcttcgtgctcggtgatgtgacgcgcctgctgcagagcctgagtgtattccacctgaggaagcaagctgcctgtcatccttgaagataaaactaggcttctgttttcttctgttaacctgaacgatgtcatttgggtcagaggtcctcccctctcagattatgttaacgtctgactctgtccaaatgagttcacttccattttcaaattttaaacaatcatattttcaatttatatattgtatttcttaatattatgaccaagaattttatcggcattaatttttcagtgtagtttgttgtttaaaataatgtaatcatcaaaatgatacacgttacactactattagctaggcttcagtctatcagtgtttatctccttgtgttaaatgtatacttgtaaataaagtagctgcaaaccttaaaaaaaaaa

SEQ ID NO: 782 - DNA, 882 bp, Rattus norvegicus
ggctcacggttggttctgtttgtgagacctgtagctcgactctgctgatagcaagatgtcttcaggaaatgcaaaaattgggcatcctgctcccagcttcaaagccacggctgttatgccggatggacaattcaaagatatcagcctaagtgattacaaaggaaaatatgttgtattctttttttaccctcttgactttacttttgtgtgtcccacggagatcattgctttcagtgatagagcagaagaatttaagaaactcaactgccaagtgattggagcttctgtggattctcacttctgtcatctggcatggattaacacacccaagaaacaaggaggattgggacccatgaacattcccttggtatcagatcccaagcgcaccattgctcaggattatggagtcttaaaagctgatgaaggtatctctttcaggggcctctttattattgatgataaaggtatccttcgccagataacaataaatgatcttcctgttggccgctctgtggatgagattctgagactagtccaggccttccagttcactgacaaacatggtgaagtgtgcccagctggctggaaacctggcagtgataccatcaagcctgatgtcaataagagtaaagagtatttctctaagcagaagtgagcactggaccagttttctggcagacagctttgagcagccagaagaaatttgtactctacacatgacgtggtgtgattccagataagcctttcctacaagggctaggggtggttagcctttcttccactattggtaaggggcagaccatcttatatcagtcacagaaaccaacctgttaattctctctctctcttttttttttttaagtatctattaaacgtgaattc

SEQ ID NO: 783 - DNA, 1603 bp, Rattus norvegicus
tggctccagacaaaatatagacgcaccaccagcctggctaggaagtaatgcttcccatgagcccccaaagaacgggaaaccagacactgcaggcaaacatctccttcttggggagtctggaagccagatatccataccaccaatgctgtgatgtcagccatgtctcccggcaacctgttgcagggtggtgctcacccatggcacaagaggaaacagatggcaaacattcctggaaactgaattgccaaggaaaatggcaccctccatctcacgggggctcctgcttctggcaggcctgtgttgcctggcccccagcttcctggctgaggatgcccaggaaaccgatacctcccagcaggaccagagtccaacctaccgtaagatttcttcaaacctggcagactttgccttcagcctataccgggagctggtccatcaatccaatacatccaacatcttcttctcccctatgagcatcaccacagccttcgccatgctctccctggggagcaagggtgacactcgcaaacagattctagagggcctggagttcaacctcacacagatacctgaggctgacatccacaaggccttccatcacctcctccaaactctcaacaggccagacagtgagctgcagctgaacacaggcaatggcctctttgtcaacaagaatctgaagctggtggagaagtttctggaagaggtcaagaacaattaccactcagaagccttctctgtcaactttgccgactcagaagaggctaagaaagtaattaatgattatgtagagaagggaacccaaggaaagatagttgatttgatgaaacagctggacgaagacacggtttttgccctggtgaattacattttctttaaaggcaagtggaagaggccattcaatcctgagcacactagggatgctgacttccacgtagacaagtccaccacggtgaaggtgcccatgatgaaccgcctgggcatgtttgacatgcactattgcagcacactgtccagctgggtgctgatgatggattacctgggcaacgccactgccatcttcctcctgcccgatgatggcaagatgcagcatctggagcaaactctcaccaaggatctcatttcccggttcctgctaaacaggcaaacaaggtcagccattctctacttccccaaactgtccatctctggaacctataacttgaagacactcctgagctcactgggcatcacccgggtcttcaacaatgatgctgatctctctggaatcacagaggatgcccccctgaagcttagccaggctgtgcataaggctgtgctgaccttagatgagaggggaacagaggctgcaggagccactgtggtggaggccgtccccatgtctctgccccctcaagtgaagttcgaccaccctttcattttcatgatagttgaatcagaaactcagagccccctctttgtgggaaaagtgatagatcccacacgttaatcactgtcctcagaagtcacatcccttctggatcgggtccccttcctaataatattaaactcaggctggcctggcctgatgcttctgcaaaaaaaaaaaaaaaaaaaaaaaaaa

SEQ ID NO: 784 - DNA, 351 bp, Rattus norvegicus
gaagtctcaaacaaaactttaatttcctgtacatactcctgtcaaatgaagttatttcctgtacaccacttttgccaactggtcttctatttcctttcatttgacctagatcggctacgagacctagagaaggatcgagacggcttgtgatttctctcacgagacagagacctttctcttctcctatctctagaaagagacctgctccggcttcgcgaaaagcttctccttcttggggattagttttgggtttcaacaagaagaaatggtgaggtgaggctgccggactgacggccaggaagaatttgctgaaaaggttttgccagatgttgcgttggatttagttggttg

SEQ ID NO: 785 - DNA, 1915 bp, Rattus norvegicus
ggcgagcggaggaggaggcacagcggccggcggccgagcactgcggagcgagccagcgggccggcgccagcgcccagcagccgcctggggccgcaggaagcaccccggggagcggcggcggcgtgtgcgtgtggcccgggtgcgggcggcggcgcgggagcagcgcagagcggcagccggttcgggcgggcggcatcatggacgagaagttgttcaccaaggagctggaccagtggatcgagcagctgaacgagtgcaagcagctctccgagtcccaggtcaagagcctctgcgagaaggctaaagaaatcctgacaaaagaatctaatgttcaggaggttcgatgtccagtcactgtgtgtggagatgtgcatgggcaatttcatgacctcatggaactctttagaattggtggtaaatcaccagatacaaattacttgtttatgggagactatgtggacagaggatattactcagttgaaacagttacactgcttgtagctcttaaggttcgttaccgagagcgtatcaccatactccgagggaatcacgagagcagacagatcacacaagtttatggtttctacgatgagtgtttaaggaaatacggaaatgcaaatgtttggaaatacttcacagacctttttgactaccttcctctcactgccttggtggatgggcagatcttctgtctacatggtggtctttcaccatccatagacacactggatcacatccgagcacttgatcgcctacaagaagttcctcatgagggtccaatgtgtgacttgctgtggtcagatccagatgaccgtggtggctgggggatatctcctcggggagctggttatacctttggccaagatatttctgagacatttaatcatgccaatggcctcacgttggtgtccagagctcaccagctggtgatggagggatataactggtgccatgaccggaatgtagtaacaattttcagtgctccaaactattgctatcgttgtggtaaccaagctgcaatcatggaacttgatgacactcttaagtattctttcttgcagttcgatccagcacctcgtagaggcgagccacatgtcactcgtcgtaccccagactacttcctgtaatgaaagtttaaccttgtacagtattgccatgaacaccgtctgttgacctaatggaatcgggaagagcagcagtaactccaaagtgtcagaaatagttaacattcaaacttgtttccacacggaccaaaagatgtgccatataaaatacaaagcctcttgtcatcaacagccgtgaccactttagaatgaaccagttcattgcatgctgacgcgacattgttggtcaagaatccagtttctggcatagcgctatttgtagttacttttgctttcttgagagactgcagatctaggatgtaacattaacacctgtgagtccagttgacttccacttagctgtagcttactcagcatgactgtagatgaggatagcaaacaatcattggagcttaatgaacatttttaaatgagtaccaaggcctcccctcttgttgtgttctttcagggatactattaatttaattgtatgatttctctgcactcagtttctcccttctcaaatctcggccccgcgttgttctttgttactgtcagaaaacctggtgagttgttttgaacagaactgtctccctcctgtaagatgatgtactgcacaagtcaccgcagtgttttcataataaacttgagaactgagaaagtcaggtttgaattgtatcagtgggcacgactggtgctgtttattaaacaagataaatctattgatcaatttcagaatttgtagaattccaggtaaagaaaaataaagatcaaggccactgtgtaaaaaaaaaaaaaaaaaaaaaaaaaaa

SEQ ID NO: 786 - DNA, 406 bp, Rattus norvegicus
gagacctcacctgttcctgtctgactctggcagcactcactgacagcaagcagcacagaaaaatgagcgctaagaaatctcccgaagaaatgaagagcatttttcaaaaatatgcagccaaagaaggcgatccaaaccagctgtccaaggaggagctgaagctgctgattcagtcagagttccccagcctcctgaaggcttcaagtactctagacaatctctttaaagagctggataagaacggtgatggagaagttagctatgaagaattcgaagttttcttcaaaaagttatcacaatgaagccagaagaaggagctccgacaccacctactgattgaatcctatccaatcccaaagatctagctgtgagagcaagatactgttaataaagcaaattctgagac

SEQ ID NO: 787 - DNA, 3105 bp, Rattus norvegicus
cagaaggaggaggcagagttggagttgggcagacgctgtggagagctagctgcaggacgctgcggagttgcagggctccgcgctgctccattcattaagtagctgcggaggatcgtggccggacgccgacgctgcccactcgcaaacttcagcacgcagacgcacgccagcccggcgcgtccgggacagcacagttttgcaaaagttcctgctcgggatttggctctcttccctttggactagcgaacagtttggggttgagaggaaagcagaggcgctcagggggaaacctacccgcgtctgcagttggagctactcggccgggctgtacactcgccgccgcgtcccgagcccgcagatccgctcctgagcagcggcggcccgcagcgccccgggaggctccccgcagccagcgccatgcaaagctacaagtacgacaaggcgatcgtccctgagagtaagaacggcggtagcccggcgctcaacaacaacccgaggaaaggcggcagcaagcgggtgctgctcatctgcctcgacctcttctgcctcttcatggcggctctgcccttcctcatcatcgagacaagcaccattaagccttatcgtcgagggttttactgcaacgacgagagcatcaagtaccccctgaaagtcagcgagactataaacgacgccgtgctctgtgcggtggggatcgtcatcgccatcctggcgatcatcacgggggaattctaccggatctattacctcaaggagaagtcccgatccaccattcagaacccttatgtggccgctctctataagcaagtgggatgcttccttttcggctgtgccatcagccagtccttcacagacatcgccaaagtgtccattgggcgcctgaggcctcacttcctcagcgtctgtgaccctgatttcagtcagatcaattgctccgagggctacattcagaactacaggtgccgaggagaagacagcaaagtacaggaggccaggaaatccttcttctcgggccacgcctccttctccatgttcacaatgctgtatctggtgctttatctacaggcccgcttcacctggcgtggggcccggctcctccgccccctcctgcagttcactttgctcatgatggccttctacacgggattgtcacgtgtatctgactacaaacaccatcctagcgatgtcctggcaggatttgcccaaggagctctggtggcctgctgcatagtgttcttcgtgtctgacctcttcaagactaagacgaccctctcactgcctgcccccgcgatcaggagagagatcctgtctcctgtagacatcatggacaggagcaatcaccacaacatggtgtaggtgctgcggcctccagagcactttctctgaagcgactgcttgacagcatgtccctgctgctctccaatctcatcagacagtagaatgtagggaaaagctttttgcccgatggattttgaaaacatttaaagaaaaaaaaaaagccttaccttgtggccttccaaaataggttgtttgcctgtgtggagacaacagtgccggagtcctgagtgctggctgcacagctggctaagtgttcatgttctagtgagcacgggcttgtcaggagcaaaacactaggataattgagcagaggctgtggtcaccttttgtgacccgagaaatcccaggccagaatagcgggggcgcttatgtagcatgcaaggcctgaaccagcaccgaatcagcccctctgcctgccccactctactgtgactttgattcaaggaagtttttgcgctttgaaataccgggaatgaacacacagtttttcagtcgagggatcagatcctgaatccaaaccccatgtcctgaggcctctgtcatctctccatccccaggctaacaaccacagtcccctcacttttagagattaggagaccctttgtggaagagtgaacttcacaaatagcacaagttcagaagacatgtagggtgtcttctcacacaccacactgtgacgcacgcggaactgccattgcggggtcaatcaccaggcacttgcacgtgtagaaacccgtagactttggttactgctatatcccccttgagatccttgctgggtgcctaccaggatttcatgtgagggccagggatgcataggcatggccaacctttggtggatcaaaagagcctcagtagagagacagggagggagggagagggcagaatgaaaaaaaagtgaaccaattcttttggctccttgggtttagagagagccagggtagcagacagtcttatgcccaaaaggtacccttccagataagggagccccaagggtcttcgcaggagttgatcttgctgtgtaaagcactgttgtcgcagggttgacccctgggacagttcttggtgggttctgctgggcagaacacataggttaaatctgtgtcgagagttttcctcatactctatccacaagtgtccttccaagcaaggtcccactctagccagtagacaaggtcccttctactgaacctccaaggaaaagaagaaggagaagaaaaagtgcttttcaaatctttcaaagggctacatgtaaccatatggatcaaccacatgcatatcctcccagactccgtcctttcatttcaacatatagcaagctatgattttatatataaaattatataaataatgtataaaacagtaaaagttaactatgtaagatattatttctgaaacaatgttagtcacacccactatgattataaactgtgtcttgacctgtgttatttactttagctgcttaaaggagcattgagtttttttggtttgttttttttttttttttaatctcaactaaagatatcatagttctgtggtagccattgttttacaatgaaataactgcgactagagggaaaaagaactgtataaaaacattaaattgtcagtatttttgtaaggttccgttttgtaaagagaataatattcaaacacttctgtggcatacaaagtgaaaaatgtgtatctgagaaactaaacatgtattaaatgtgctttttaaaataaaagctcataacatgaaaaaaaaaaaaaaaaaaaaaaaaa

SEQ ID NO: 788 - DNA, 2997 bp, Rattus norvegicus
gagagtgactctggcagcgctggcatcagactggagacttgacagggttggagagaggcagcaggaccatggactccaggaacatgcttgtcgtttactctgtgaacttggagaaaaagctgaacgctgctgcccaccacacgattgagtaccaaactcagaagctcgtgctcaggcgtggacagatattctccctgaaggtgatgctaaacagaccgctccaatctcatgatgaactgaagctgatattcaatactggacacaacatgccattctacactgtggagcttgatccaatgacatcctaccgttccaagggctggcaggtgaagattgctaaacagtctggtgtagaggttgtattgaatgtcatcagtgctgccaacgccgtggtggggaggtacacgatgaacgtgaacgaatttgacgctggagtgttcttccttctcttgaatccgtggtgctcagatgacagtgtcttcatggctagtgaggaagaccgagcagagtacgtccttaatgataccggttacatgtacatgggttttgccaaacagattaaagagaagccctggacctttggtcgtttgagaagtacacttgaactgctgcttccgattgttgacccatttggagcccaaggaaatgcagagccagtgcttgtgtccagggccatttgtactatgatgtgtgctgcaaacaattttggagtgctggtggggaactggacaggagactatagcaatggcactgccccgtatgtgtgggccagcagtgtacccattctccagcagcactacatcaccaggatgcctgtacgctttggccagtgctgggttttctctggagtcctgaccacagcactgagagcagtgggcatcccagctcgcagcgtgactaactttgagtcagcccacgatacagaaaagaacctcagagtagacatctacctggatgaatcgggcaagacaattccacatctgaccaaagactctgtctggaatttccatatgtggacagatgcctggatgaaaagacaggatctaccccagggccatgatggttggcaggtcctggattctacaccacaggaaatcagtgaaggacaattccgcattggaccttcaccggtgtctgctatccgccagggattggtccaattcatgtatgacaccacatttgtgttcacggaggtgaacggtgacaagtacatctggctggtgaagcagaaccaggaaagagagagaagaatgtctcatcgctgtggagactgcgctagcatcggcaagaacatcagcaccaagatggtgggcgagaacaggcgtcaagatattaccttgcattacaagttcccagaaggcagcccagaggagaggaaggccatggagaaggcctctgggaaacgtcctgatgacaagctcaactctcggacacttcacatatctgtcctccagaactctgtggagctaggacatcctatcaatttgaccatagtgttgaaaaggaaaacggccacaccacagaatgtcaacatttcatgctcccttgacctacagacttacacaggcaacaagaagacaaacctgggagtcatccagaagactgtgcagattcaaggccaagaatcagaggtgtctctcagcatggattccagtttctacatctataaactgggcatggttgatgatgagatggtcattaaagggttcatcattgcagaaattgttgattctggtgaacgggtagccactgatacgaccctgtgtttcctgtactctgccttctctgtagagatgccgagcacaagcaaggtcaaccagcctctgaccatcacctgcaacttcaagaacaccctgcccatccctttgactaacatcaagttctcagtggaaagcctgggcctcaataacatgaagtcctgggagcaagagacggtgccgcccggaaagaccatcaatttccagatagaatgcaccccagtgaaaactgggaatcccaggaagttcattgtcaagtttatttccagacaagtgaaagaggttcatgccgagaaggtcgttctcatcacaaagtagcccatctgataccattgagatggaggcaggagccctgattggctctgagccttggtaagcatgttagcatttcctaaattgcatttagctctcaggtcagaaatgattaaattttaggggttggggatttagctcagtggtagagcgcttgcctaggaagcgcagggcctgagttccttcattttgggtagagctacttaggcccactgtatccattcctgtaggacttcataatgtgggccagcaggacattaccagggagagagggttgtggtctggtggacgttggtatctgccatgttttcttacttgaaagttactggttttgttctttatcctttgtaagtatacaggccttaaaggttttgtgtatgaggatatgagtgcatgtgtgagtttgcatgcacatgtgggtacttgtgtgtagaggtcagagattggtgtcacaggtctcccttaagtactgtggaagaatctttcacttaaatagagcttgtctaaatctgctaatctggctagctagtgtttcttccccccacacactggcgtcaccagcagataccacaagcttgtaactgtgttagcactggggtctggacctgggtccttaggtctgcatgcaaagtgctttgcctgctgagccatctccccaaccttcattttgatttttcaggtctggggattgcaactcatggcctcatatatactaggcaaggcctttatcactgacaccagaccctatcccctctccacagggattctaggaggggctctaccactgagccacgccctcagtgcctccatgggggattctaggcatgagttccaccattaaatgatacccctagtttctcactgatggatttcaggcaagtgccctcctgctgagttcgactttccagcccctaattagggggtagag

SEQ ID NO: 789 - DNA, 2535 bp, Rattus norvegicus
gagcagtaccccggccactgccagtgtgtgcgtggtgcaggatagactcatggcttcgcctctgaggttcgacgggcgtgtggtcctggtcaccggcgccgggggagggttgggcagagcttatgccctggcttttgcagaaagaggagcattagttgttgtgaatgacttaggaggggacttcaaaggcgttgggaaaggctcttctgccgcagacaaggtcgtggaagaaataagaaggagaggcgggaaagcggtggccaattacgattcaggcgaagcaggcgagaagcttgtgaagacagcactggacacattcggcagaatagatgttgtggtgaacaatgctgggatcctgagggaccgttccttctctaggataagtgatgaagactgggatataattcaaagagttcatttgcggggctccttccaagtgacccgggcagcatgggatcatatgaagaagcagaattatggaagaatcattatgacggcctcagcttctggaatatacagcaactttggccaggcaaattatagtgctgcaaagctgggccttctgggtctcgccaatactctcgtgattgaaggcaggaagaacaacattcattgtaacaccattgccccaaacgctgggtcacggatgacagagacggtgatgccagaagacctcgttgaagccctgaagccagagtatgtggcaccgctggtcctttggctttgccatgagagctgtgaggaaaatggtggcttgtttgaggttggagcaggatggattggaaaattgcgctgggagaggaccctgggagccattgtcaggaagcggaatcagcccatgactcccgaggcagtgagggacaactgggtgaagatctgtgacttcagcaatgccagcaagccgaagagcattcaagagtccacaggtggtataatcgaagttttacataaaatagattcagaaggaatctcacaaaatcacaccggtcaagtggcatctgcagatgcatcaggatttgctggcgtcgttggccacaaacttccttcattttcttcttcatatacggaactgcagtgcattatgtatgccctcggagtaggagcttcagtcaaaaatccaaaggacttgaagtttgtttatgaagggagtgctgacttctcctgtttgcctacatttggagtcattgtcgctcagaagtccttgacgagtggaggcttagcagaggttcctgggctgtcaatcaactttgcaaaggttcttcatggggagcagtacttggagttgtataagccacttccccgatcaggggaattaaaatgtgaagcagttattgctgacatcctggataaaggctctggcatagtgattgttatggacgtctattcttattctggcaaggaacttatatgctataatcagttctctgtcttcgttgttggctctggaggctttggtggaaaacggacatcagaaaaactcaaagcagctgtagccgtaccggatcggcctccagatgctgtactgagagataccacttcactgaatcaggccgctctgtaccgcctcagtggagactcgaatcctttacacattgacccgagctttgcgagcattgccggttttgagaaacccatattacacggattatgtacttttgggttttctgcaaggcatgttttacagcagtttgcggataatgatgtgtcaagattcaaggccattaaggttcgttttgccaaaccagtgtatccaggacaaactctacaaactgagatgtggaaggaaggaaacagaattcattttcaaaccaaggtccaagagactggagacattgtcatttccaatgcatatgtggatcttgttcctacatctggagtttccgctcagacaccttctgagggtggagcactgcagagtgctcttgtatttggggaaataggtcgacgcctcaaggatgttggacgtgaggtggtaaagaaagtaaatgctgtatttgaatggcatatcacgaaaaatgggaatgttgcagccaagtggaccattgacctgaagaacggctctggagaggtttaccaaggccctgccaaaggctctgctgacacgaccatcacaatttctgatgaggatttcatggaagtggtcctgggcaagcttaacccacagaatgccttcttcagtggcagactgaaggcccgaggaaacatcatgctgagccagaagctacagatgattctgaaagactatgccaagctctgaaggacccactgcgtgctttaataaaaccagaatcattacgttctgtctacgcagtcatgctccagccttctttgaaacgatccacggtaatgtgcagcagaaatcgcttaacattttcagattcagataactttcagattttcattttctactaatttttcacatattatttttataaggaactgtaatctagctagcaaataattgttctgttcatagatctgtatcttaataaaaaaaaagtcaaccgaaaaaaaaaaaaaaaaaaaaaaaaaaaa

SEQ ID NO: 790 - DNA, 410 bp, Rattus norvegicus
agaacaacaaatcaaaatgtaaacttaaaatataaccaaaagagggacagctctttaggaaaaggaaaaaaccttaaatagtgaataaacaactacaaccacttaaccattgtaggcttaaaagcagccatcaataaagaaagcgttcaagctcaacatacatacttacacacactaattccacaaacctcaataaattcctatattacaaattgggctaatctatagacccatagatgaaatactgttaatatgagtaacaagaaccaattctcctagcacaagtgtatgacaacccggataaccattgtcaattatcgaatcataggtactaacccaacaataaaattacctatccctaactcgttagcccaacacaggcgtgctttaaggaaagattaacaaaaaaa

SEQ ID NO: 791 - DNA, 1736 bp, Rattus norvegicus
tctcacccgcgccgctcctcgcctctcttgttagccggagactcgcctctcagccgcccgccgcacagacgcacgagtatacagtgcagctccatcggctgatccttgctgagctccaagtgtaggcggcaccgggcggcccacgatgccgaagaacaagaagcggaacgctccccaccgcggtggcgggggtggcggcggctccggggcagcgacgtcggcggccacgacaggtggcccgcatcggactgttcaacctttcagtgatgaagacgcatccattgaaacaatgagccactgcagtggctatagcgatccttccagtttcgcggaggatggaccagaagttcttgatgaggaaggaactcaggaagacttagagtacaagttgaagggattaattgacctaacccttgataagagtgcgaagacaagacaggcagctcttgaaggtgttaaaaatgcgctgtcttcaaaagtgctgtatgagtttgttctcgagagaagaatgactttaactgatagcattgagcgctgtctgaaaaaaggaaagagtgatgggcagcgcgcagctgcagcgctcgcgtccgttctttgtattcagttgggccctggattggaaagtgaagagattttaaagactcttggaccaatcctaaaaaaaataatttgtgatggaacagcgagtatccaggctaggcagacttgtgcaacttgctttggtgtttgctgttttattgccacagatgacatcactgagctgtattcaactctggagtgcttggaaggtatcttcaccaagtcctaccttaaagagaaagacacgaacgttccttgcagcactcctaatacagtgcttcacatcagctcgcttctcgcatggacgctactgctgaccatatgcccaatcagtgaagtgaagaaaaagctggagctgcatttccataaacttccaagcctcctttcttgtgatgatgtaaacatgagaattgctgctggcgaatctttggcacttctgtttgaattggccagaggaatggagagtgactttttttatgaagatatggattctttgacccagatgctccgggctctggctacagatggaaataaacaccgtgccaaagtggacaagagaaagcagcgctctgtcttcagagacgtcctgagggctgtggaggaacgggattttccaacagaaactgttaaattcggtcctgagcgcatgtatattgatagctgggtcaaaaagcacacctatgacacgtttaaagaggctcttggatcagggatgcagtaccacttgcagacaaatgaattccttcgcaatgtatttgagctggggccccctgtgatgctcgatgctgcaacacttaaaaccatgaagattcctcgttttgaaaggcatttatataactctgcagctttcaaagctcgaacaaaagcccgaagcaaatgccgagataagagagcagatgttggagaattcttctagatgtctgtctttgatgtctgttttctaatttcttcctttattattatttttgctacttctaatgtacataagcttttagagacttttttatcttggtcaacttagataatttttgatgtagggatgggttatattttaatttaatgtacagtgttacaaattaatgagttctttattctgtaaaaataactgataaccacaaataaaagtgtttgtgatgcttggtcaaaaaaaaaaaaaa

SEQ ID NO: 792 - DNA, 3148 bp, Rattus norvegicus
acgaggtatcagcacttttctttcattgggggaaaggcgtgaggaaagtaccaaacagcagcagacttttaaactttaaacagacaggtctgagagcctgaactctcatttttcctttgacttcagcctccaaggagttccaccaactttggcgcgccggcttcactttcattaagtgaaagagaggtgcccagacatgggtgactggagtgccttggggaagcttctggacaaggtccaagcctactccaccgctggagggaaggtgtggctgtcagtgctcttcatattcagaatcctgctcctggggacagctgttgagtcagcttggggtgatgaacagtctgcctttcgctgtaacactcaacaacctggctgcgaaaacgtctgctatgacaagtccttccccatctctcacgtgcgcttctgggtccttcagatcatattcgtgtctgtgcccaccctcctgtacttggcccatgtgttctatgtgatgaggaaggaagagaagctaaacaagaaagaagaggagctcaaagtggcccagactgacggggtcaacgtggagatgcacctgaagcagattgaaatcaagaagttcaagtacgggattgaagagcacggcaaggtgaaaatgaggggcggcttgctgagaacctacatcatcagcatcctcttcaagtctgtcttcgaggtggccttcctgctcatccagtggtacatctatgggttcagcttgagcgcggtctacacctgcaagagagatccctgcccccaccaggtagactgcttcctctcacgtcccacggagaaaaccatcttcatcatcttcatgctggtggtgtccttggtgtctctcgctttgaacatcattgagctcttctacgtcttcttcaaaggcgttaaggatcgcgtgaagggaagaagcgatccttaccacgccaccactggcccactgagcccatcaaaagactgcggatctccaaaatacgcctacttcaatggctgctcctcaccaacggctccactctcgcctatgtctcctcctgggtacaagctggttactggtgacagaaacaattcctcgtgccgcaattacaacaagcaagctagcgagcaaaactgggcgaactacagcgcagagcaaaatcgcatggggcaggccggaagcaccatctccaactcgcacgcccagccgttcgatttccccgacgacaaccagaatgccaaaaaagttgctgctggacatgaactccagccattagccatcgtggaccaacgaccttccagcagagccagcagccgcgccagcagcaggcctcggcctgatgacctggagatttaaaccggcttgagcatcgagctgtcgattatggaggagaaaaaaaggtgcttgcagaacatgcacctagggtgttcattttcgttcccgtggagttggtactcaacaacctcagcaatgaggcatagaaaacaaagacattacaatacctaggttccttgggggtgcttgggatagctgggcggaacaggtggggataagggaggtacacattgatatttaatgtagaagattcaaagaacttaaattctagtaagagtcgcattgggtgaacatagataagggctttctctctctgcccccatcccccaactgaaccttaagaatgagtctgtgtacatgaattgagtgagtgatatttttttttaattttgttttactgagattctgcgatagctttgagcagaaatctgagtcctccacatagcgtttcctttatgaaaagacagattgtcctacatcccccccccccaaaaaaaacattccagtgtttaaaaacttgcattttgcaggtaagcttccctggtctacccctctgggtgtgagtggaccttgtgttatttgctagacacgattttcattcttagtatcaatctgaagttcagacaaggctcaaagaaaaacgaccgcccatgtagttgcatctcactgggttctttgctgaatctgtctcacctttgtgccttccaaacatcatcctcgactggtcctcgccctcaccaaacggcttctatcaacatttttaaaacagtcataacgtcatttttagtttagttttttttttttcttttgagttagcatcagggaggtgagccatgctcaagatttaacaatcgcttctacgtgtggatgtgcgcatgtgtaagtgtgtgttttgtcattattggtacaagcagaggcagtctagactcacaaatacagatttgaatctaatgcacagtgttcaaatttgaaccttcctagtggatttttgtggtgtgggccaatgcggtgtttacattatagaattcctgccgtgcaagtaaagcacagtttttccctgaaaattttttttccaggtattccattatggatactggttttgttaattataatttctctctctctctctctctctctctctctctctctctctctctctctcttttagaatgtagcagtaatcgccattactgaaatgaatgattttctttttttttgaaatataatcattgatgcttgaatgatagagttttagtactgtaaacgggctttagtcattaatgtgagagacttagatggggattgcctagagtggactatcaagtgagcctaaaggaactttgtagtaactggtaatctgattttttttttgtcctacttaactacacataactcagaacttgtattctgagtttaacagtcttttagattgacgagcaacttggatgtttgcactaagactttgtttgaaacactaaggggcgagggaggtttcaacagtgcacatgtaactaatttatttgaactgtatgctaaagacaccagtttcttcaaatgactttttttaaaaaaaaacaaaaacaaaactcatcacagatgattgaaatgtcgagttatcatgtgtttccctcttgcgcgtcagctacagaaaagagtttttgtacaatgagaaactaatgtgtttgacattccacgttaaactgctgtcgtgttcggcttcgtagcatgtaatgtagacctagcccatccattcatgtgctcgggagagtgttctttatccaataaagttttaatttagtatataataaaaaaaaaaaaaaaaaa

SEQ ID NO: 793 - DNA, 4325 bp, Rattus norvegicus
cccggatagggctacggaatcgttctactggacaccagcactgggaattcatttttgaggtcaatttccaatcgagataaatctattggattagtaggattatctgatcgcagctcaaagaagtaacgttgtttgatcgcttgtatttcttgcctgatggtcggaattacacggatgcggctttggttctccaggattctggatcgtggcagcatctggagagaaaaaaagcatcaatccacacgtttaggaagtgtccgtgggtgaataacgagggagggggaggtggatctggggttgcggctgcttaaagaaaaaataaataaataaaggaggcatcttgaattctgaaacaagaattactcagttccagaggttgaaaagaaagcatctgcaaactggtaaatactttgaccatttcggcttgaatttgactgggaagtgttgttaaaactgtctccttgaataatttaaagaggactgggggaagatgagggggctccctccgtggacgtgcttccctgagggagatagacccacagctaactggatttgatttatacgagggaaatctacatcaatggccactctcaccacattgctgctatgggaaacagaatggtcaataggagatgttctgatgaatagtgatgattgaagatccggcatcagtctgtgtgaaatcaatgggagctacttgctgcatgaagagtgttttcagctttccttaacaagttcctatctgagaaactggagctgcattctaccaccattccatctttctccagcggatacaaatatttttgcctcactgtaccagatagacaactaatgtgggaccatggcacttcccagatgcatgtggccaaattatgtttggagagccatgatggcatgtgtggtccacaggggatcgggtgccccgttgactctctgcttgttgggatgtttgctacagactttccacgtactctctcaaaagttggatgatgtagacccattggttactactaactttggcaaaataaggggaattaagaaagaactcaataatgaaattttggggcctgtcattcagtttcttggggttccatatgctgctccaccaacaggagaacatcgatttcagcctccagaaccaccatctccctggtctgatatccggaatgccactcagtttgctcctgtatgtccccagaatatcattgatggcagattgcctgaagttatgcttcctgtgtggttcactaataacttggatgtggtttcctcatatgtgcaagaccagagtgaagactgtctatacttaaacatctatgtcccaactgaagatgtaaaaagaatatccaaggaatgtgccagaaaacccggcaagaaaatatgtagaaaaggagatattcgggacagtgggggtcccaaaccagtgatggtgtacatccatggtggctcttacatggaaggtactggaaatctatatgatgggagtgtgttggcaagctacggtaatgtgatcgtcatcacagtcaactatcggcttggggtacttggcttcttgagcacaggggatcaggctgccaaaggaaactacgggctccttgacctcatccaggccctcagatggaccagcgagaacattgggttctttggtggtgaccccttgcgaatcaccgtgtttggatcaggcgctgggggttcatgtgtcaatctgctgactttatcccattattctgaaggtaaccgttggagcaattcaaccaaaggactttttcaacgagcaatagctcagagtggaacagccctttccagctgggctgttagtttccagcctgcaaaatacgctagaattctagccacaaaagttggctgcaatgtgtcagatacagtagagttagtagaatgcctgcagaagaagccttacaaagaacttgttgatcaagatgttcaaccagcccgataccacatagcctttggacctgtgatcgatggtgatgtaataccagatgaccctcagatactgatggaacaaggagagttcctcaattatgatatcatgttaggagttaaccaaggggaagggttgaagtttgtggaaaacatagtagatagtgatgatggtgtatcagccagtgattttgactttgctgtctctaattttgttgataatttatatggatatcctgaaggcaaagatgttttgagagaaaccattaaattcatgtatactgactgggctgatcgccataaccctgaaactagaaggaagacattgttggctttgtttacagaccatcagtgggtagcacccgctgtggctacagcagaccttcactcgaactttggctcacctacatacttctatgccttttatcatcattgccaaactgaccaagttccagcttgggctgatgcagctcatggggatgaggttccctatgtattgggaatccccatgattggccctacagagttatttccttgcaatttctccaagaatgatgtgatgttgagtgctgtagtaatgacatactggacgaattttgctaaaaccggtgacccaaatcaaccagttcctcaagacacaaaattcattcataccaaacccaaccgctttgaagaagtagcatggaccagatattcccagaaagaccaactttatctccatattggattaaaaccgagagttaaagaacattacagagccaataaggtaaatctctggttggagctggtacctcatctgcataatctcaatgacatttctcagtatacctcgacaacaactaaagtgccatcaacagacatcactctcagacctacaaggaaaaattccactccagtcacatcagcctttcccactgccaagcaggatgatcccaaacaacaaccaagtcccttctcggtagatcaaagggactactccacagagctaagtgtcacaatcgcagtgggagcctctctgctgtttctgaacatcttggcttttgcagccctatactacaagaaagacaagaggagacatgatgtccaccggaggtgcagccctcagcgcaccacgaccaacgacctaacccatgctccagaagaggaaattatgtctctccaaatgaagcacactgacttggatcacgagtgtgagtccatccatccacatgaggtggttcttcggaccgcctgccccccagattatactcttgctatgaggaggtcaccggatgatgttcctttaatgacacctaacaccatcacaatgattcccaacactataccagggattcagcccttacatacattcaacacatttactggaggacagaataatacactgccccacccccaccctcacccccattcacattcaacaaccagggtatagccagatgagagagacaaactgattttttttttctgatggagtgcagtaaaagattattggaagattccttggctttcaacttggaagactctcactatttaaataaggaggaatattgtgtgaatatacatatcaagaactttgggggttttgaaaaaaatgaattgtatatagatatacacacaaatcaactttaaaaaaagcaaattccaattgctagaagcaatggttctgaatgatactttttcattcactttcaagaattaatttgttgaagatttaagttacataatggagttaggcatgtggatcgcactcgtgccgaagatatccgcagttccattggacccttaatgtgagccatatttctaagtacacagacacctatgctgtaatggcacagcagaagctcatgctgaaattgccagtaaaccacagaaagtttaagactggcaggtaccacattatcacataagtgctgtcagtactaagtcgtggggatcaaggagactggatatttttaagcacgatgtgcatgataatttatatgcttggtggctgtgctgctgattaagccgtaattaaaattcttctcatcccattggagtttttaataggagcttcctccatcaattggcagaaactaaagaagatcttataaggggcaaaagtaattacaataaaataatttgcagtagtttcgatcatagagggaatagttattaaagtcttgggagaaactagaggtatagtggtgaatactcgctgatatgaatcccagaaaaaaatttctatgagtttaatattctcttcattcccttctacgtagtttatagaactacaactctaattggacatgtgttagctgcggagttataaatttctgtgggtttgttactctgaagtttgttcctttcggtaacagtcttacaaggtataagaacgctctgcc

SEQ ID NO: 794 - DNA, 1494 bp, Rattus norvegicus
ctcgacacgctgtcaggcggtgctttgctgctggcggggttgtggtccgcgtcgcgaggaagccatggaggacggtgagttaatcaagtactttaagtcccagatgaaaggagaccctaacatggcctcggcggtggctgccatccagaccttgctggaattcttgaagagagataaaggagagacaatccagggcctgagagcccatctcaccaaagccatcgaaaccctctgcgctgtggactcctcggtggccgtgtcctcgggcggggaactcttccttcgcttcatcagcctcacctccctggagtactccgactactccaaatgtaaaaagatcatgatcgagagaggagagcttttcctgagcagaatatccctgtcaagaactaagatcgccagtctatgccatgcttttatcaaagacggggcgagaatcttgactcacgcctactccagagttgtcctgagggtcctggaagaagccgtggcagccaagaaacgtttcagtgtgtatatcacggagtcacagcctgatttatctggtaagaaaatggccaaagccctctgccacctcaatgtccctgtcactgtggtgctggacgctgctgttggctatatcatggagaaagtagaccttgtcatcgttggtgctgaaggagtggtagagaatggaggaattattaacaagatcggaaccaaccagatggccgtgtgtgccaaagcccagaacaagcccttctatgtggttgcagaaagtttcaagtttgtacggctctttccactcaaccagcaagatgtcccagataagtttaagtacaaggcagacaccctgaagtctgtgcaggctggacaggacctcaaagaggaacacccatgggtcgactacacctccccatccctcatcacactgctgtttacggacttaggtgtgttgacaccatccgctgtaagcgacgagctcatcaagctgtacctgtgagcagtgcccctcctgccaacatgcagggagcacatcttgtgcagggtgagcagcctttccactccagccagccaggggccaacaatgggactttcagacctgtatgccaagggctcatttcagaggccctgaagaatcctttactcttgctgtcacatctgaagcctggtcccagttctagaactcaaggtgaagcaaccttgtggtttttagagactcagtctccggaagaacaagttaattacagactgcaaagctgaggagagatggcacaggagcagggaccccccagccgtgctgcatcactgagagatgcggtgacatcggctgagtacacaccttcagtgcctcacaagacagcagacactgtagctgacggcatctggctccatgccctcagcaggatccagccagatagaaaaaacaccaatgcaggagccattcacatggcactgtcacagaatgttgtctgtaaaagatgcgagtttactctaaacatgtttaaaacctga

SEQ ID NO: 795 - DNA, 1898 bp, Rattus norvegicus
cctgcccgttaaataccgctccccgccgcactccgggctcacccagctcgtcgccactgtctccagacgtgcccgggaggaggggcgttccccacgccatggcatcaaccgagggtgccaacaatatgcccaagcaggtggaagtgcgcatgcacgacagccacctcagctccgaggagccaaagcaccgaaacctgggcatgcgcatgtgcgacaagctggggaagaacctcctgctctcactgactgtgtttggtgtcatcctgggagcagtatgtggcgggctgcttcgcttggcggctcccatccaccctgatgtggtcatgttgatagccttcccgggggacatcctcatgaggatgctgaagatgctcatcctccctctcatcatttccagtctcatcacagggctgtcagggctggatgctaaagccagcggccgcctaggcacgagagccatggtatattacatgtccacgaccatcattgccgctgtgctgggggtcatcctggtgttggccatccaccctgggaatcccaaactcaagaagcagctggggcctgggaagaagaacgacgaggtgtccagcctggatgccttcctggatctcattagaaatctcttcccggagaacctggtacaagcctgtttccaacagattcagactgtgacaaagaaagttctggtggcacctccatccgaggaggccaatacaaccaaggcagtcatctccctgttgaatgagaccatgaatgaggcccctgaagaaactaagatcgttatcaagaagggcctggagttcaaggacgggatgaatgtcttaggtctgattggattctttattgctttcggcattgccatggggaagatgggtgtagcaggccaagctgatggtggagttcttcaacattctgaacgagattgtcatgaagttagtgatcatgatcatgtggtattccccgctggtatcgcctgcttgatctgtgggaagatcatcgccatcaaggacttagaagtggttgctaggcagctggggatgtacatgatcacagtgatcgtgggcctcatcattcatgggggcatctttctccccttgatttactttgtagtgaccagaaaaaacccattctccttttttgctggcattttccaagcctggatcactgccctgggaaccgcttccagtgctggaactttgcctgtcaccttccgttgcttggaagataatctagggattgacaagcgtgtgaccagattcgtcctcccagtcggagcaaccattaacatggatggtacagccctttacgaagccgtggcagccatcttcatagcccagatgaatggggtcatcctggatggaggtcagatagtgactgtaagccttacagcaactctggcgagcattggtgcagccagtattcccagcgccgggttggtcaccatgctcctcattctcacagctgtgggcctgccgacagaggacatcagtctgctggtggcagtggactggctgctggatagaatgagaacttcggtcaatgtagtgggcgattcttttggggctgggattgtctatcacctttccaagtccgagctggacaccattgactcccaacaccgaatgcacgaagacatcgaaatgaccaagacgcagtccgtttatgacgacacgaagaaccacagggaaagcaactctaatcagtgtgtctatgccgcacacaactctgtcgtaatagatgagtgcaaggtaactctggcggccaatggaaagtcagctgactgcagtgttgaggaagaaccttggaaacgtgaaaaataatgacccgattctcagccaattcttgaataactccccagcgtatcttatggtaaaagatgctctaaacaggcttccttt

SEQ ID NO: 796 - DNA, 5341 bp, Rattus norvegicus
ctgagctctatgatttctatcactatttctacatggtgaccaacacgctcttctatgtcagctcagcagtgacatacacagccacgatggctctgagaacctgggcgctgtgctggaggctgcggatctggctggcatccttgtgtctcaccaggctggcttggacccccagggagagagtctttctccacgtgatgaagcccaggaggccttcctcactcaggagctccaggcggctggggatggagctgacttgggcagaagctgatggtacctggatgaagacctgaagtgtggcgcggctcaccagcaccgtgcacacacgcgaggcaggctcaggctccccgtccgcgctttccacttcgtgcttctgtcccatgataaccgccatgggcagtgggggccgaggagcgcggccgagaagaccgtgcagcggagaagcggggtgccaagagcgcgggccgcctgcggagcgactgccccagccagccggatcccggtctcagcccgagccccaccggagcggagccggcccggtgctccaactgtccgcagccatgctggccggccgcgccgcacgcacctgtgcgctgctcgccctctgcctcctgggcagtcgggcccaggatttcgggccgacccgcttcatctgcacttcggtgccggtggacgccgacatgtgtgccgcgtccgtggccgcgggcggcgcggaggagcttcggagcaatgtgctgcagctccgggagaccgtgctgcagcagaaggagaccatcctcagccagaaggagaccatcagggagctgaccaccaagcttggccgctgcgagagccagagcaccctggacgcgggtccgggcgaggccaggtcgggcggcggccgcaagcagcctggctcgggcaagaatacgatgggcgacctgtcccggactccggcctcggagacgctcagccaactcgggcaaactttgcaatccctcaaaacccgactggagaacctcgagcagtacagccgcctcaattcttccagccaaaccaacagcctcaaggatctgctgcagagcaagatcgatgacctggagcggcaggtgctgtctcgagtgaacactctggaggagggaaaagggggccccaagaacgacacagaggaaagggccaagatcgagagcgccttgacctccctacaccagcggatcagcgagctggagaaaggtcagaaagacaatcgacccggagacaagtttcagctgacattcccactgcggaccaactacatgtatgccaaggtgaagaagagcctgccggagatgtacgccttcactgtgtgcatgtggctcaagtccagcgcggcacctggagtgggcacgcccttctcctatgctgtacctgggcaggccaacgagctggtcctcatcgagtggggcaacaaccccatggagatactcattaacgacaaggtggccaagctgccctttgtaatcaacgacggcaagtggcaccacatatgcgttacctggaccacccgggacggggtctgggaggcctatcaggatggcacccagggaggcaatggagagaacctggcaccctatcaccctatcaaaccacagggtgtgctggtgctaggccaggagcaggacactctaggcggagggtttgatgccacccaagcgtttgtgggtgagctagcccatttcaacatctgggaccgcaagctgacccctggggaggtgtacaacttggccacctgcagcagcaaggccctctctggcaatgtcatcgcctgggctgagtcccagatcgagatctttggaggagccaccaagtggacattcgaggcttgccgccagatcaactgaaggcttcaggctagggctgagcccccgccccccgacgcctgcccaccctgcttgtgcagtgacccatcctctctctccctcccccccaacccccaggaatgactcaaggtcatggcccctgcacacgcacacgcacacagcctggtttgtcctccttgtgctcatgaagcagtcccggctcttctatggccccaaggatagccccttcttcctaagggcccttctatttcccgggcatgccatgctaaagcaggcagtatcagctttggcaatgcagaattatgtgagagagagagagagagagtgtgtgtgtgtgtgtgtgtgggaatgtgtgtgtatgtgcgtaggggaggctttcttctaaaatgaggtagttcattcccttctttctttgcgatttttgtaagtttcctgatgggtcagctgcccatgggcctcggggctggctcgggcttcctcggacacccatttatcgttgtttgcagacctctttgacataggtctctgttaacaagtttgttaaggttggggacctttcacgggaatctttatttgggatgataaagtggattctctgaaatttaaaggctggttgtccgggatgcaccacctgccaatcgtccctttcccatacccccatcaggccgtctgctgtctgctgtcatctgagggtagaggtgggtccttcagcaggtgtaccccagggactgctccttacctacccttggccttcctgcctccttgtatctatcaagggatctgttactccctttcagtttccaaagctacttcagcccagtggttctgagaggagagtgcccttccagagtcccaggacaccgggccttggcacccacccttcctcctccctatggcaataagagaccagaggcttcaagtggggatctcacgtgcttggtctcaactctacagggtactgagacttgacccacagtccgtgggaatgttttcccacggcatttttcacagccatactccctccccccagcacacccaggcccaggtgagctagctcagacctcaggggccaggggctcagaaacctctcatgcgaagcctgctggccagggtggggcctgccatccactcttgcatttcatggggcagcagcccccaccggccaccggcctgtgacactgagcccgtggctttttcttattgaaagtagcacgagggtacccccttctgggccttccaaggagggggacgaaatatgtgtgtgtgcgcgcacgtgtctgtggaatgctaaggaggttgtgtccaggtgtgggggaccctcgctttgttcccccatgttgcgggcacacgcccaatggcacctggacgacatctccagtaacctgactagcagaaggctggcaagtctttctagaaacctacgcactgcctggctcgtctgcagctgcagacacttaacttcctcatcaggagcaggtttttccacctgctgttccttccaggggcacctgtctccttccacacaggtccatgttgtgtctgaatctagtgcatccgtgtctgtctgtgtactgtctgtgtcgctgtttcttgtgggcgtctgcacggttcccggtcaccgctctgtggcgcatcccctctccgagggtgcggatcaggctgtgctccactcctccttgtccaagcagtggctttttttcttagataattgtgcttcctcagcacccgtcgggttgtggcatccttggatctgcggggatcttctgtgtttgcatgttccttggggtggtgtgttccttgctcccttggtccgacgcgtgttccttccttgcctgcatggacttctctggttctgtgttcgtgtgctgaatgccacccagtgttctgtgatcacccatgtagctactgaaaaatacggctgggtaagcaagccaggggtgttggggaggtcgagagagagaccagcatccctctcccctccccctcctccccagacatagcaagaagcattttctaacatctaggttgagaacaagcctgaatggtacccatggttgggagagagaactccagctttgaattgactttacagaccagatcgagccccacccttacttactttagccttctgggagccaccaccaggcgaggcccagagccggctgtggccggtgtactcctgccaacccctgccaccagccccagccccagcccctgccaactcggaccccagaccacttgcaccctgacgggtggggtgggagctgtccgttcaggaccacaagccatcctctgccctggctttgagggcagagcacaccccaatgcttctgcctctgtcccttcatctctcagcccctctcccttctcctctcccctgcggcacccacggtgccagggacagacgctgacatctagctcttgccctgcccctaactggagtctgtgccaagccctcttctccgtcactgtgttcacacttggcacttggctggccctgagaaacgtaatgacagccgcaaatctaatccgcatactttccatcgactccgtaatctgatcgatgttccctcttgcactgaataatacatgcctctctcaggtaagccattttataaaataagagataaaatgcactgtcgagacagtgtttgcttctgccgatggtgtccgacagcaccctgggcattagggtggtagagctgccacagaggctcccagcgcctagaggctgacgagctcacttgaatcgtaagccttcttgcttttgataacacagtattatttctcttactgtagaagaaaaagtttattaccaaacaagagtatttttatgaaaggataggacaaacctataaattatctcaacgtatatctatctcccttgaaaaaaaatactttcagactccaccaaaatgtagggctgaaagagtgtattttggaagaaagagatacatttttgtatgcttttttttccttttgtagaactcccgacttagtttctaagactgcaaagatcacttcgtcaccagccctgggacctgagaccaaggggttgtcttgtgggcaatgaggggggaaggacaggccggcctgaggttcacagtcattccaatgggttctgatgaggggccgctggatcttgaaggtgtgttggggaccaggaggttaaaaagataggccctccctcgatggtgggttctttgtgttggagctgaatggttacatggaaggagttgagaatttggataccagttctgggcttggtagaagaaactagggtcactctggctaacataagggtacagcatccttagtaacccgagcgtggctcgaagcgttcatgatttcatccaaaacacaacatgtaaacttactcagctaacaatgggaaaatgtattgcttctgtgcgcagtggacttatgtgcaatttgttcaaaagggaacaagtcattgaggagaaacaagcccaatacttagagtcccaattttgtcttatttgcca

SEQ ID NO: 797 - DNA, 2968 bp, Rattus norvegicus
atggcggccgacagccgggaggagaaagatggggaacttaatgttttagatgatattttgactgaagtaccagaacaggatgatgaactgtataatccagagagtgaacaagataaaaatgagaaaaaaggatcaaaaagaaaaagtgaaagaatggaatctattgacaccaagcgacagaagccttctatccattcaagacaactgatttctaagccactaagctcatctgttagcaataataaaagaatagttagtacaaaaggaaagtcggttacagaatataaaaatgaggaatatcaaagatctgaaaggaacaagcgtctagatgctgatcgaaaaattcgtctgtcaagcagttcctctagagaaccttacaagagtcaaccagaaaaaccttgtctacggaaaagggattctgaaagaagggccaagtctcctacaccagatggttctgagagaattgggcttgaagttgatagacgtgcaagcagatccagccagtcttcaaaggaagaggggaactctgaggagtatggctctgaccacgagacaggaagcagtgcttcttctgaacagggcaacaacactgagaatgaggaggaaggaggggaagaagatgtagaggaagatgaagaggtagatgaagatggagatgatgatgaggaagtggatgaagatgcggaggaggaggaggacgaggaagaagatgaggaggaggaggatgaggaagaagaagaggaagaggaagaagaatatgaacaggatgagagagatcagaaggaagaagggaatgattatgacacccgtagtgaggccagtgattctggttctgagtctgtttccttcacagatggatctgtcaggtctggttcaggaacagatggatcagatgagaaaaagaaggaaaggaagagagctcgaggcatatcacccattgtctttgatagaagtggcagttctgcatcagagtcatatgcaggttcagaaaagaagcatgagaaattatcatcttccgttcgtgctgtccgaaaagatcaaaccagtaaactcaaatctgtccttcaggatgcaagatttttcctcataaagagtaacaaccatgagaatgtgtctcttgccaaagcaaagggtgtatggtccacattacctgtaaatgagaagaaattaaatcttgcgtttagatctgcaaggagtgttatattaatattttctgtcagggaaagtggaaagtttcaaggttttgccagattgtcatcagaatcgcatcatggtggctctcctatacattgggtgcttccagcaggaatgagtgctaaaatgcttggaggtgtttttaaaattgactggatttgcaggcgtgaattaccctttactaagtcagctcatctcaccaatccctggaatgaacataagccagtaaagattggacgtgatggacaggaaattgaacttgaatgtggaacccagctttgtcttctgtttccccctgatgaaagtattgacttgtatcagctcattcataaaatgcgtcacaagagaagaatgcattctcagcctcgatcaagaggacgtccatcccgtcgagaaccagtccgggatgtgggaaggcgtcgaccagaagattatgatattcataacagcagaaagaaaccaaggattgactatccccctgagtttcaccagagaccagggtatttaaaggatccccgataccaggaagttgacagtttcacaaatcttattcccaacagacgattttcaggagttcgccgagatgtgtttttaaatgggtcctacaatgattatgtgagggaatttcataacatgggaccaccgcctccttggcaaggaatgcctccttacccgggaatagaacagcctccacaccatccctactaccagcaccatgccccgcctcctcaagcccaccccccttactcaggacaccatccggtaccacatgaagcaagatacagagataaacgagtacatgactatgatatgagggttgatgatttccttcgccgcacacaagccgttgtcagtggtcggagaagtagaccccgagaaagagatcgggagcgagagcgagaccgccctagagataacagaagagatagagagcgagacagaggtcgtgatcgagaaagagagagagaaagaatatgtgatcgggacagagaccgaggggaaagaggtcgttatcgaagataatgtgctttttggaagcactgactgaagataaaaaatattgtattttttttgtgtgtgtttacaagtagtaaatttattttcagctgtctacttaaagctcattgtgtagaaggatttattatcttctttgttccaagcatgcagtagaataagaactggaaaactcagatccgccaaaaaatgcacagttgacagttgagttgacacttttattggggcagaatggaacagtccaagaatgtagatattgattcattctccataaatgttctttttacagtgtattcatcctagagttattttgtttgtttgttttccttcttttggaccttggtcaatactgccatagtattttgctttgtgtttctataggtagctgcacacggttcagtaaaaataatgctgctatcaagtatgcagatattgagtatgatggtttgactatatggcagtgttgtagcagcctctcggtttctcctcttccctccttttttttaaacctataaatccactttttttttaagtcttcaatgatgagagcaatattaagaagacattgctatctaatttttaatctttttaaataaaacgttcctatgttcagtagcatggtcgatgctattgtttagccttccttccaaactgtacattggcttggaatgttcagttttgcgtgtgtggcagcagaagataaccccacattctacattgctactgttttgtatgaaataaattggtaaagattgacact

SEQ ID NO: 798 - DNA, 816 bp, Rattus norvegicus
atgaactggagcgtctttgaggggctcctaagtggggtcaacaagtactccacagcctttggtcgcatctggctgtctctggtctttgtcttccgtgtgctggtgtacctggtgacagccgagcgtgtgtggggtgacgaccagaaggactttgactgcaacactaggcaacccggctgtaccaacgtctgctatgatgagttcttccctgtgtcccacgtgcgcctctgggccctgcagctcatcctggtcacatgcccctccttgcttgtcgtcatgcatgtggcctatagaaaggctcgagagaagaagtaccagcaagaagttggcaaagggtacctctacccaaaccccggcaagaagcgaggcggactctggtggacatacgtctgcagcctgttgttcaaggccaccatagatattattttcctctaccttttccatgcattctaccccagatataccctcccgtctatggtcaagtgccattcggcaccatgtcccaacacagtggactgcttcatcgccaagccctcagagaagaacatcttcattgtcttcatgttggtcacggccatcgtctgcatcctgcttaaccttgtggagctgctctacttggtgatcaagcggtgttctgagtgtgcaccagcgaagagaccgcccactgcacacgcaaagaatgacccaaactgggccaacccttccagcaaagagaaggacttcctctcaagcgacctcatctttctgggctcggacactcacccacctctgttacctgatcgccctcgagcccacgtgaagaaaaccattctgtga

SEQ ID NO: 799 - DNA, 2070 bp, Rattus norvegicus
taaaaaatggcggcggtgattcggattcgggcgatggcagctggaacgaggctcagagttttgaactgcggcctcggcaccacaatccgcagcctttgcagccagccggtctcagttaatgagcgcatcgaaaacaagcgccatgccgcgctgctgggaggaggccagcgacgcatcgacgcacagcacaagcgaggaaagctgacagccagggagcggatcagtctcctgctggatcctggcagcttcctggagagcgacatgtttgtggaacacaggtgtgccgacttcggaatggctgccgagaagaataagtttcctggagatagtgtggtcactggacggggcagaatcaacggacgattggtttatgtcttcagtcaggactttacagtttttggaggcagtctgtcaggcgcacatgctcagaagatctgcaaaatcatggaccaggccataacagtgggggctccagtgatcggactcaatgactccgggggcgccagaatccaggagggggtggagtccttggctggctatgcagacatcttcctgaggaatgtcacagcgtccggagtcatccctcagatttctctgatcatgggcccatgcgctggtggggccgtctactcccccgccctgacagacttcacattcatggtgaaggacacgtcctacctgtttatcactggccctgaatttgtgaagtctgttaccaatgaagacgtgactcaggagcagctgggtggtgccaagacccacaccactgtgtcaggtgtggcccacagagctttcgacaatgacgtcgatgctctgtgtaacctgcgtgaattcttaaactttctgcccctcagcaaccaggacccggcttccatccgagagtgccatgaccccagtgaccgtctggttcctgagctggatacagttgtccctttggagtcaagcaaagcctataacatgctggacatcatacatgcagtgattgacgagagagagttttttgagataatgcccaattatgcaaaaaacattgtcattggctttgcaagaatgaatgggaggaccgttggaattgttggcaaccagcccaacgtggcttcagggtgcctggacattaattcatctgtgaagggggctcgctttgtcagattctgtgatgctttcagcattcctctcatcactttcgttgacgtccctggcttcctgcctggcacagcgcaggaatatggaggcatcatccggcatggtgccaagctgctctacgcctttgccgaggccaccgtgcccaaaatcacggtcatcaccaggaaggcctatggaggtgcctatgatgtcatgagctccaaacaccttcttggtgataccaactatgcctggcccacagctgagattgcagtcatgggtgcaaagggtgccgtggagatcatcttcaaaggacacgaagacgtggaagccgcccaggcagagtatgtggagaagtttgccaatcctttccctgcagccgtgagagggttcgtggatgacatcatccagccgtcctctactcgtgctcggatatgctgtgacctggaagtcctggccagcaagaaggtccatcgtccttggaggaagcatgccaatgtcccactgtgaagagatcaaaagaagagagcaacagtgagaagctggccttttgcagcctacccctgccttctacaatcatgaaagaacggatctacataccttggacactgattgaattgcataaagagttcctgtgcttggagaaaaattatgtgctctattaaaatcttcactggtgctttctgaataactatttcatttttatagtagaaatctcaacctacacaagaaaaccaaaaaaacggggaggagggaaccagaattgtagttgccttgtatctggttctggctgacagtaatgtggttaggattcattggcctagaggtcacgtgtgggaacttggattccgtgtggagtggtgagagggaagatatagtgggaggtgctgaggtcagctgggctgggatctgtgctacccaagaggctgaggtctttcctcagctgct

SEQ ID NO: 800 - DNA, 1630 bp, Rattus norvegicus
cttttttttcctctcccttgatttcaacattttcccgatcttcttggcgccgccgacgcctcttacctgttctgcgcagcgcgcgagctggcagctgagagaagtgggggtgcgttttaggttttaagcaaaggcaaaaaaaaaaattaagccaaatccattttttttccttcacctctccccgtttcaaggcctccaagatcattatttctgtagctttggggtgagcgattctgtgtttctcttcatcacccctccaattctgccccgatcccgcctgggtctccactcactgcgtgcacctggcgcgcctcttttttttttcacccccaacctgttgcaagtctttaatccttgcaattgggacttgcgtgcaggcacctgaatcctccttgcctcatattttgcaagtgtttggaggacagcacctgctttacctgcaagagatattttttaaaaaaaaaaaaatctccaggctccctcttggcccctttctccacacactctcgctctcctgccccgccccgaggtaaagccagactcggaaaaaatggtgatcagcgtggtcctcctgctgctggccgcctgtgccgtgccggctcaaggcctgggctctttcgtgcattgtgaaccctgcgacgagaaagctctgtccatgtgtccccccagccctctgggctgtgagctggtcaaagagcccggctgtggctgctgcatgacttgcgccctggcggagggacagtcgtgtggcgtctacactgagcgctgcgcccagggtttgcgctgtctcccccggcaggatgaggagaagccgctgcacgccctgctgcacggccgcggggtttgcctcaacgaaaagagctacggcgagcaaaccaagatagagagagactctcgggagcatgaggaacccaccacctccgagatggctgaggagacctactccccgaaggtcttccggcccaagcacactcgcatttccgagctgaaggccgaggctgtgaagaaggatcgcagaaagaagctgacccagtctaagtttgtggggggcgcggagaacactgcccacccccgagtcatccctgcacctgagatgagacaggaatctgaccaaggcccctgccgcagacacatggaagcttccctccaggagttcaaagccagcccacgcatggtgccccgtgccgtgtacctgcccaactgtgaccgcaaaggattctacaagagaaagcagtgcaagccttctcgtggccgcaaacgtggcatctgctggtgtgtggacaagtatgggatgaagctgccgggcatggagtacgtcgatggggactttcagtgccacgccttcgacagcagtaacgttgagtgacgcgtcccctcccttcctccccctttcctaccccccagccccaactccagccagcgcctccctccaccccaggacgtcactcatttcatctcatttaggggaaatatatatacatatatatttgaggaaactgaggacctcggaatctctagcaagggctaaggagacactccccattcccgaccccggaaacgtattcctatttgaagcaagttgaacggacagagaagggaagaagagaaggggcaagaaggagcgaggaat

SEQ ID NO: 801 - DNA, 1407 bp, Rattus norvegicus
agcgctataactactgaatatactatggctaacgaccccttagaaggtttccatgaagtgaacctcgcttcgcctacctctccagaccttcttggtgtgtgtgacccgggaacccaagagcagactacctccccgagcgtcatctaccggccacacccttcgacgttgtgctctgccactatccaggccaatgccttaaatctttctgaccttcccacacagcctgtgtattcatccccgaggcatttaaactgtgcagaaatatctaacatcagcattcatgttccagagccagcatcatcggtagcctctgaggtggcagcagggctcacgaggttcacctcaaggaaggacagctgcaacgcagagagggagtttctgcagggcgccaccgtcacagaggcttctgctggcaacgatgacatctttgggttgagcacggacagcctgtcccgtttacggagcccatctgttctggaagttagagagaagggctacgaaaggttaaaagaagaacttgcaaaagctcagagggaattgaagttaaaagatgaagaatgtgagagactttcgaaagtgcgagatcaacttgggcaggagttggaagaactcacagctagtttatttgaggaagctcacaagatggtgagagaggcgaacgtcaagcaggcaactgcagaaaagcagctgaaggaagctcaagggaaaattgatgtgcttcaagccgaagtggctgcgctgaagacactcgtactgtccagttctccaacatcgcctacgcaggagcctctggcggatggaaagacgccctttaagggggggcacacacggaacaaaagtacaagcagtgctatgagtggcagccaccaggacttcagtgcgatccaggcaatcgtaaaagactgcagagaggccgatctatcgctgtataatgagttcaggtcttggaaggatgagcccacaatggacagaacatgtcccttcctagacaaaatctatcaggaggatatctttccatgcttaacattcgcgaaaagtgagttggcttcagctgttctggaggccgtggagaacaacactctaagcatcgagccggtagggttgcagcccatccgcttcgtgaaggcttccgcggtggagtgcggagggccaaaaaagtgtgctctcactggccagagtaagccctgtaagcacaggattaaactaggggactccagcagctattactacatctctccggtttgcagataccggatcacttctgtatgtaacttttttacatacattcgatatattcagcagggacttgtgaaacagcaggatgttgatcagatgttctgggaagttatgcaactaagaaaggagatgtcgttggcaaagctgggatatttcaaagaagaactctga

SEQ ID NO: 802 - DNA, 2213 bp, Rattus norvegicus
ggtagcggctcgtctcttgctctgcaaggctactgccagacttgctgagtctcgggaccgctccggctcttattgccactctctcgtgctctcctcgctaccccaagaagcaggatggccgggaccgtgcgcaccgcgtgcttgctggtggcgatgctgctcggcttgggctgcctgggacaggcgcagcccccgccgcctccagacgccacctgtcaccaggtccgttctttcttccagagactgcagcccggactcaaatgggttccagaaacccctgtgccaggatcagatttgcaagtatgtctccccaagggcccaacatgctgctcaagaaagatggaagaaaaataccaactaacagcgcgcctgaacatggaacaactgctccagtctgcgagtatggaactcaagttcttaattattcagaatgctgcggttttccaagaggcctttgaaattgttgttcgccatgccaagaactacaccaatgccatgttcaagaataactaccccagcctgactccacaagcttttgagtttgtcggtgaatttttcacagatgtgtctctctacatcttgggttctgatatcaatgtggatgatatggtcaatgaattgttcgacagcctctttccagtcatctatacccagatgatgaacccaggcctccccgagtcagtattagacatcaacgagtgcctccgaggagcaagacgcgacctgaaagtatttggcagtttccccaagcttattatgacccaggtttccaagtcactgcaagttactagaatcttccttcaggccctgaacctcggaattgaagtaatcaacaccaccgaccacctcaagtttagtaaggactgtggccgtatgctcacccgaatgtggtactgctcttactgccagggactgatgatggtcaaaccttgtggtggttattgcaatgtggtcatgcaaggctgtatggcaggtgtggtagagatcgacaagtactggagagaatacattctgtctcttgaagagctcgtgaacggcatgtacagaatctacgacatggagaatgtgctgctcggactcttttcaaccatccatgattccatccagtatgtgcagaagaacggaggcaagctgaccaccactattggcaagttgtgcgcccactcccagcaacgccaatatagatctgcttattatcctgaagatctgtttattgacaagaaggtattaaaagtcgcccgtgtcgaacatgaagaaaccttatccagccgaagaagggaactgattcagaagttgaagtctttcatcagcttctatagtgctttgccaggctacatctgcagccatagccccgtggccgaaaacgacaccctgtgctggaacggacaagagcttgtggagagatacagccagaaggcggcaaggaatgggatgaagaatcagtttaacctccatgagctgaaaatgaagggccctgagccagtggttagccagatcattgacaaactgaagcacattaaccagctcctgagaaccatgtctgtgcccaagggtaaagttgtggataaaagcctggatgaggaaggacttgagagtggagactgtggtgatgatgaggatgagtgcatcgggagctctggtgacggcatgatgaaagtgaagaaccaactgcgcttccttgcagaactggcatatgatctggatgtggacgatgctccagggaacaagcaacatggaaatcagaaggacaacgagatcaccacctctcacagcgtggggaacatgccatccccactgaaaatcctcatcagtgtggccatctacgtggcgtgctttttttcctggtgcactgacttgccatgcccatgcctgtgctgccctgcagcaccttgtggccctcctacataaagggagccaccttcctttttcttttcttttttttttttaccttgtatgcctcctctcaccgccattaagtaggagactaaccacgtgttatgttttcgaaaatcaaatggtatctttatgaggaaggtaaattttagtggtaggatagattgtcttttttgcaaaaaaaaaaaaacaaaaaaaattcaagttgtgccaaattattttcttacatttgactgctggaacatggttgtcatggtttccctcttttctctttctctgcatggatttctttgacaaaaaaaataaataaacattcaaat

SEQ ID NO: 803 - DNA, 3115 bp, Rattus norvegicus
ggagggaacacggtgcctcgggttgtgtacacgctccactgacagagcttcttgcagccgggcagccgctgatcacgcgtggccccgccagcccattggctgaggcctcacacacctttgccgctgattggtcgataccacgccccgccttccaccccgcccgcggcgcggggcaggcagagcggctacctgcatggggagggggggcagacagcgcggagcgcggtggcgtcgacgtctagtgtctcagtgctccgtctgtggctaggcagccagcagccaagcagctcgcgacctacggccaggcagccaaccatgcttaacttcggcgcttctctccagcaagcttcggaggggaaaatggaactaatttctgaaaagtccaaagagggagcacatccctgggacaaagctgaacagagtgactttgaagctgtggaagcgctcatgtccatgagctgcgactggaagtctcacttcaagaaataccttgaaaacaggcctgtcacaccagtgtctgatacctcagaggaagacagtttgcttccagggacgcctgaccttcagaccgtcccagcattctgtttgactccaccttacagcccctctgacttcgaaccctcgcaggggtcaaatctgacggcaccagcgccacctactggtcacttcagatcgctctccgatgctgccaagcctcccagcatcgctccttttaaagaggaggaaaagagcccattagctgcccctcccctccctaaggctcaagccaccagtgtcatccgtcacacagctgatgcccaactctgtaaccaccagtcctgccctgtgaaagcagctagcatcctcaactaccaggacaattctttccggagaagaacccacataaatgtcgaggctactcgaaagaacataccctgtgctgctgtgtcaccaaacagacccaagcctgagcccagcacagcggcgaatggcgctgagaaggccggcactgcgccgtatgactttgctgtgccttcctcagagacagtcatctgtaggtcttctcagccagctcccacgtccccagtacagaagtcagtactgatgtcttcacctacagtgtccactgggggagtgccacccttgcctgtcatctgccagatggttccccttccagcaaacaactctctcgttaccacagttgtccccagcagtccgcccagccagccacccgctgtctgctcacccgtgttgttcatgggcactcaggtgcccaagggcacggtcatgtttgtggtaccccagcccgttgtacagagcccaaagcctccagtggtgagccccaatggcaccagactgtctcccattgcccctgcgcctggattctctccttcagcagcaagggttactccccagattgattcgtccagagtaagaagtcacatctgtagccacccaggatgtggcaagacttactttaaaagttcccatctgaaggcccacgtgagaacacacacaggggaaaaacctttcagctgcagctggaaaggctgtgaaaggaggtttgctcgttccgatgaactgtccagacaccggcggacacacacaggtgagaagaaatttgcctgtcccatgtgtgaccgtcggttcatgagaagtgaccatttaaccaaacatgcccggcgacacctatcagccaagaagctgccaaactggcaaatggaagtgagcaagttaaatgacatcgctctgcctccggccacagcgtcggcacagtgacggccagaagatggagactcagaataaactttggtcagagtcgagccggtgaccgtgtcaaatgcttctgcaagtctgcggccctccaacagggcctaaagcagaagcccctggcctggggggaggcccagcctgggttagatgacgagaagtgcttcagccacaggcagttcacagaagggcggggttcatttcttaccacgtagagagatgagaacactcgtgtcccttgagtagttttggaaggtttcggatgagatgagcacagcacaggttttgaatcacatacacatcaggtactttgtttttgccatttatacttgagaccagctttgcagtgtgattcttttaaagcgttggtttcgagaatatagaggctgaaattacggtacagaaatgcagctagaaagtgagtttgtgtcatcttctcctagagttatcttgcttattattcctagtctttacagtcaactccgtggacgtggctaagtatagaaaactatcatttcttccactgttgttggtatttgaggttgaacagctgtacattgctaaggggagcccaaggattggaactctcattaatttaattgcttggaagtgcagctaaagttcttttttttggccttttgttttgaaagtttaggcattttactctaccttagatattagtttgcttgcagttttttgtgtagatttgaaaactgtacaccaatgtgtttcctatagacttaagatacgctgcgctttgtttagaaaacaatctggcagtgaaaatatgtgtcgtaaagaagagatgtcaagaatttgagatgactccttgagaaagatggcttatgtcatcagcaaaggacacttacgtcagacgtacactgtttctatcaaatcaggaagttagtgaccatcacagatggacaggtgtccttttatttataggagtttgtcaggatgtctgagtagataggtaggaaattgttactagaacattcacttccgacttgacaaggatattcatggtgcagatacgttcttcctgccgctgcagtgtctgggtgtccgggaaactccgagactttaaagtgtcataatgtggtcacacctgcagttctggggatccagagccttgcttgtgttctgtaagctctgtcaccgagttgtatccccacctgaaagcagtgacttttgctaacagtatttctgttctgttgtaaagtggatagaagacacacttggtagtaaaggtaaattattcaaagtccacagtgaaaaactcaccataccttcccatttaaaccgtttctgtatctcataggtttctgacatgcaaacttgaacccttgaaaaaaagagttttctt

SEQ ID NO: 804 - DNA, 345 bp, Rattus norvegicus
ttttttttttttttgttaaacttgaattttctgaagccttttatgtaccactaagcaaataactttaatttttaaataaactgggtttatatccttagttatatttctaattgttataagacatacttgctaaagtaacttaagccctcaaatgtagccgggaagagtttgagatagacttcagttactttccctgtacccagtaaagcactaattttgttaccttattgcctttacattgcttagtcttgaattctgttcactgttttgtttgagatttaaagttattttcttactgtatttatcatacctactgttttaataatctgccgtccttaaatgcaa

SEQ ID NO: 805 - DNA, 3485 bp, Rattus norvegicus
gaagtgaagttgctgtcagtggcgcctccggctcccggggaagctgagagtttccgcaggtggcggctgcggcggcggcggcagcggtagcaactgcaacagtagcaacgaaggctgtgggtctgcagctgtgttcccagtcgacattgctcacggtgaaggtgacatctccctccagtttcacaaaatgagtgtggtatggttacgaagaccaggacctaaacttcacagagagcccagcctgctgttctgatgccgaaagggagacagaaagtcccacgcttggatgcccgcctgggcctgcctatctgcctctgtctggaattagccatcttctttctggttccccaggtcatgggcctaacagaggcaggtggtcttgacaccttgggtgcaggggggctaagctgggctgtacatctggacagcctagaaggtgagaggaaggaagagagtctgatacaacaggcaaatgctgtggcccaggcagcggggctggtgaatgctgggcgcattggagagctccaggggcactacctctttgtccagccagctgggcacgggcaagccatggaggcggaggccatgcggcaacaggcagaggctgtgttagccaagcatgaagctgtgcgctggcactcagagcagaggctgctgaagagggccaagcgcagcatccacttcaatgatcccaagtatcctcaacagtggcacctgaataatcggcggagcccaggaagagacatcaatgtgacaggtgtgtgggagagaaatgtaactgggcgaggggtgacggtggtagtggtggacgacggagtggagcacaccgtccaggacattgcacccaactatagcccagagggaagctatgacctcaactctaatgacccagatcctatgccccaccctgatgaggagaacggtaaccaccatgggacccggtgtgcaggagaaattgcagctgtgcccaacaacagcttctgtgcagtaggtgtggcctatgggagccgaatagcaggtatccgggtgctggatggaccactcacagacagtatggaagctgtggcattcaacaaacactatcagatcaatgacatctacagctgcagctggggccccgatgatgatgggaagacagtggatggtcctcatcagcttgggaaggctgccttacaacatggagtgatggctggtcgccaaggctttggaagtatctttgtggttgccagtggtaatggtggccagcacaatgacaactgcaactatgatggctatgccaactccatctacactgtcaccataggagctgtggatgaggagggacggatgcctttttatgcagaggagtgtgcctccatgctggcagtcaccttcagtggaggagacaagatgctgcggagcattgtgactactgactgggaccttcagaagggcactggctgcactgaaggccacacaggaacctcagctgcagcccctctagcagctggcatgatagctctcatgctgcaggtgcggccctgcctcacgtggcgggatgtccagcacatcattgtcttcacagccactcagtatgaagatcatcgtgcagactggctcactaatgaggctggattcagccacagccatcagcatggtttcggcctgctcaacgcctggagacttgtcaatgcagccaagatctggacgtctgtcccttacttagcttcctatgtcagccccatgctgaaagaaaataaggctgttccacggtccccccactctctggaggtcctatggaatgtcagcaggacggacctggagatgtcggggctgaagaccctggaacatgtggcggtgacagtctccatcactcacccacgacgtggcagcttagaactgaaactgttttgtcccagtggcatgatgtctttgatcggcgcgccccgcagcatggactcggaccctaacggcttcaatgactggacattttccactgtgcggtgctggggggaaagagcaagaggagtctacagactggttatcagggatgtaggagatgagccgctccaggtgggcatcctccagcagtggcagctgacgctgtatggctccacgtggagtccagtagacatcaaggacagacaaagtctcttagaaagtgctatgagtggaaaatacctgcatgatgacttcactctgccttgcccacctggactgaaaattcctgaggaggatggttacagcattacccctaacacactcaagacccttgtgctggttggctgcttcagtgtcttctggaccatttactacatgctagaagtgtgcctgagccagaggagcaaggcttccacccatggctgcaggagaggatgctgcccctggcccccacaaagccaaaactccaaggaagtggggacagcactagaatcaatgccactgtgcagcagcaaggacctggatggagtggattcagagcacggggactgcacaactgcctctagcttgctggccccagagctgctgggggaagctgactggagtctgtcccagaacagtaagagtgacctggattgtcctccccaccaacccccagacctgaaggatggacagatctgctgaccccagagcccagcttcttccatgtacaacaggctcttcctaaacttggttatgaggctttcaatcatggatgctcaggagagaatggtcctgatagtgacatctgccacccaaggcctctgaagcattctcagccttctcaagagggtgagggccatcttaattaagcgcagtggtaagggactggtgttcatggctcctctagctgagctttgctgagagcctttcgacaaggggttggcgcccaggccaggcagcccttgatttcatctctctcgggctagtcactgtcctcggccatcaggacctccaccccttcacaagttatgcagcaggtgcctgtatacctaggaacactctcaacagaagtgccgctgtaccgagggcccagagagaggctggcaagagcctagacatgcctaccctgaaagcagctgccttcattaccctttcctgtgtgcctgttctgaagcccgtaccttcactaccactcacccttcctgctgaaggaatggtggcgtgtcccaggaaaactgggaggcacaggattcccagccagcacccttgctgcctcactggggaagttgtcctgctgggctgcagagagctgagacacagtgttgtctaagatagcatgggagcccctgcctatgaccacctgtcttcctctgcaaagtgctcagggaaatggccttcattccagaggccagctgtccgcctgacttttcctccattcttggccttctccccttcccatctttggagctaattgttaatatgaattttttaatgcttaagatttgatttttacttttcaaagcaacattttgttgaatttttttctgcacagctttccaaaataaaaagcagaagtaaaaaaa

SEQ ID NO: 806 - DNA, 616 bp, Rattus norvegicus
tgctatgacctggtcaatgacttctactgtgtctgcgatgatggctggaagggcaagacctgccactcacgcgagttccagtgtgacgcctacacctgcagcaacggtggcacatgctatgacagcggcgacaccttccgctgcgcgtgccccccaggctggaagggcagcacctgcacgatcgccaagaacagcagctgcgtgcccaatccctgtgtgaatggaggcacctgtgtgggcagtggagactctttctcctgcatctgccgggatggctgggagggccgcacctgcacacacaacaccaatgactgcaaccctctgccctgctacaacggaggcatctgtgtggatggcgtcaactggttccgctgcgagtgtgcacctggctttgcgggtcctgactgccgtatcaacatcgatgagtgccagtcctcaccctgtgcctacggagccacgtgtgtagatgagatcaatgggtaccgctgcagctgcccaccaggacgttccggccccagatgccaggaagtggtcatattcacgaggccctgctggtcccggggcgtgtccttcccacatgggaagttcctgggtagaagactgcaacagctgccgc

SEQ ID NO: 807 - DNA, 549 bp, Rattus norvegicus
attgtggggttagtacctatgattcgataattgacaatggttatccgggttgtcatacacttgggctaggaaaattggttcttgttactcatattaacagtttttcatctatgggtctataaattaccccaatttgtaatataggaatttattgaggtttggggaattagtgtgtgtaagtatgtatgttgagcttgaaccctttctttattgatggctgcttttaaccctacaatggttaaggggttgtagttgtttattcactatttaagggtttttccttttcctaaaaagctggccctcttttggttatattttaagtttacattttgatttgttgttctgatggtaagcttaaagttgaactgaaattcttttttgggcaaccagctttcaccaagctcgataggcttttcacctttacctaaaaatcttcccactattttgctacataaacgggttgattcatgaaattgtttttaggtagctcgtttggtttcggggttcttagcttaaattctttttgttaaggattttctagttaattca

SEQ ID NO: 808 - DNA, 3655 bp, Rattus norvegicus
agtcgaagcggctgcagctggcgccgcgtctgccccgcgtgcccggagcggattctgccggccgcccccggagccctgctgagccggttatcgcttcctgcctgtgaccgaccagcgttgcagagcctagcaatgccgtttggttgtgtgactctgggtgacaagaagaactataaccagccatcggaagtgactgacagatatgatttgggacaagtcgtcaagaccgaggagttttgtgaaatcttccgggccaaggacaagacaacaggcaagctgcatacctgcaagaaattccagaagcgtgatggccgcaaggttcggaaggcagccaagaacgagattggaatcctgaagatggtaaagcaccccaacatcctgcagctggtagatgtgtttgtgacccgcaaagaatacttcatctttctggagctggccacggggagggaggtgtttgactggatcctggaccagggctactactcggagcgagacacgagcaacgtggtgcggcaggtcctggaggctgtggcctacttgcactctctcaagattgtgcacaggaacctcaagctagaaaacctagtgtactacaacaggctaaagaactcaaagattgtcatcagtgactttcacctggctaagctagagaacggtcttatcaaggagccctgtggaacgccggagtatctggcaccggaagtggtaggacggcaacggtatggacgtcctgtggattgttgggccattggtgtcatcatgtatatcctgctttcaggcaacccgcccttctatgaggaggtagaagaagatgactatgagaaccatgataagaatctcttccgcaagatcctcgccggtgactatgagtttgactctccgtactgggatgatatttctcaagcagccaaagacctggtcacaaggctgatggaggtggagcaagaccagcggatcaccgccgaagaggccatctcccatgaatggatttctggcaatgcagcttctgataagaacatcaaggatggcgtctgtgcccagatcgagaagaactttgccagagccaagtggaagaaggccgtccgagtgaccactctcatgaagcggctccgggcaccagagcagtctggaacggctgctacttcagatgctgccactcccggggctgctggtggggccgtcgctgcagctgcaggtggagctgccccagcctctggagccagtgctactgtaggcacagggggtgatgctgggtgtgcagccaagagcgatgacatggcctctgcagatcgtagtgccaccccagccacagatggcagtgccaccccagccacagatggcagtgtcaccccagccactgacgggagcatcaccccagccactgatgggagtgtcactccagctactgacaggagtgctacaccagctactgatgggagagccacaccagccacagaagagagcacagtgcccgccgctcaaagcagtgccgcgccagctgcaaaggcagcagccacccctgagccggctgtggcccagccggacagcacagccctagagggtgccacaggccaggctccaccctctagtaaaggagaagaggctactggctgtgcccaggagtctcagagggtggagacaagctgaatgggcagtctgttgggggttttgagggatgggaaggagggtgggagtttggatgaggggcttctcactgtatatagagtcactggcatgatgccctagctccccccaagctccctcatcccagtggggcatgcctgggggccatgggagagcagtgtcgtctcctgtgtggatgtatgtgagtggtgggcaggccagaggcagggccagccccagcccctgcatggattccttgtggctttctgtctttcgctagcttcaccagtttctgttccttgtgggatgctgctctagggatactcagggggtccttgctctccttcccttcccgtcttctcatgtccccaggcaggccctgcaagcctcatactttcccaggccctaaatgggtggccttgccctgagagctggtcctccagcgaggccctgtcagcagtgttaggctcctgcacacgaaggtgtgtgtacctgtggtgtttgggctgctctaggagtagatgctggctgtaaaagatgatgcagaaatctagggcagtgtgctttaagttaagtctggtcacatggttgggggcaggcactgcatgttagctgtggggatcctcagaagtgggagagagaatgggtagaagcgtccatctttttccctgggtgggggtggggatcttccctctgaagatccttgtgttatttcatagcctcctgagtcctgtagtgggttgctctgcatcctgattcttacgacactccaaaggaagagagaaacatgttggatgcagcagcgatgcctaggagaacagagtacagggccagcagcaccagtgccccagcctatctgggtcttctctgtgagcgagatagggagggctggtgtcccccatggtcttcctagatgccactaccaacgaagagacctttcccataaccacctcatgcaggctcaggccataaatcctcttcctcccagggaggcatggcagtacctcataggctgctttgggagcttgcttttcacagcagcagattttctgttcttcgttcagcaatgcggagaggctttacctctgtgtctactaccagaggctgaggtatcgctcagccatgggatgaggaagtagaataagatttcccagctccctgagggatgctctcggcaggcacccttggtcagactctaccacagcctgcacaggcagccacgctggtccttgcccttgctcggcactccatggtggtactgcccttctccctgcatgcctgtgggtctgctctggtatgtgaaggttggtgggctaactgtgtgcctgctgaacctggcaaataaacgtcaccctgcaaagcctctggccaccctcttgcctttgcttcctctgtcctattggggaggagcctatggaaggcagtgtgggagggaagaggccatgggagcagttccgggtagcggctgatgctcagtgcattgcttggggtaagagtggaggtcaccttctccgatgtgtacctggatgatgttaatggtaaatcctctgggctcaaaaaaaccatgagtggtgtgtttaagccaagaagtatccctagccgagcactgaagggctgatgcttttccaattcttgttgacgaagagcctttgtcttaacttggacatagaggtggaatccactcagggacaaccactataggaagtgaccttgttcatgggcacagtgggcctccttgggctggggagaaagtggggttgcacaagttttgtgctgtatgttgatgcctacttcctgtgaatacctgtgctttccacttagaccaaaaagatttcattctgtcttccctggctgacgcagacctgctttataatatggagtcatgtatgttccttttgggggagtaatattgctaatgatactataaaaatccctaaggagattcgcttcaactcggaggggctttggtaaactcatctgggttgctttctcagggaggaccttaaattatctgatgtgggaataataaaga

SEQ ID NO: 809 - DNA, 4228 bp, Rattus norvegicus
tgtggagaagaagggagcgtcggaccggaacggatgtatacatctcaagattgagaggaagaaacaagtcatgggccagtggtcaagatacttctctgggaattgttgctgctgataactgctttaccaagtcatacaatgagtgtttggtttaaggaagattttaatatttaaaagattttcatcttggaaaattgatcaagtgaagatttcatttctttttttttttgggaaacattttcctcctcataaattacccttgtaatgggcgacatggcaaacaactcagttgcatatagtggtgtgaaaaactctttgaaagaagctaatcatgatggcgactttggcatcacacttgccgagctgcgggccctcatggagctcaggtccacagatgcattacgaaaaatacaggaaagctatggggatgtctatggaatttgcaccaagttgaaaacatctcccaatgaaggtttaagtggaaatcctgcagatttagaaagaagagaagcagtgtttggaaagaactttatacctcctaagaagccaaaaacctttcttcagttagtatgggaagcattacaagatgtcactttaattatactagaaatcgcagccatagtatcattgggcctttctttttatcaacctccggaaggggataatgcactttgtggagaagtttctgttggggaagaagaaggtgaaggagaaacggggtggattgaaggagctgccatcctcttgtcggtggtgtgtgtggtgttagtgacggctttcaatgactggagtaaggagaaacagttccgaggcttgcagagtcgaattgaacaggaacagaagttcaccgtcatcaggggtgggcaggtcatccagatacctgtagctgacattactgttggagacattgcccaagtgaagtacggtgatcttcttccagctgatggtatattgattcaaggcaatgaccttaaaattgacgagagttcgttgactggcgagtctgaccatgttaagaagtctctagataaagaccccttgcttctttcaggtactcatgtaatggaaggttctggaaggatggtcgttactgctgtaggtgtgaactctcaaactgggatcatctttaccttacttggagctggaggcgaagaggaggaaaagaaagatgagaagaagaaagaaaagaaaaataagaaacaagatggagctattgaaaatcgcaacaaagcaaaagcccaagacggcgcggccatggagatgcagcctctgaagagtgaagaagggggagatggtgatgagaaagacaagaagaaagcaaatctgccaaagaaggaaaagtctgtgttacaagggaaacttacgaagctggctgttcagattggcaaagcaggtctgctgatgtctgccatcacggttatcatcctagtgctatattttgtgatcgataccttctgggttcagaagaggccgtggcttgctgagtgcacgccaatctacatccagtactttgtgaagttcttcattatcggggtcaccgttctagtggtcgcggtgccggaaggcctcccgctggccgtcacgatctcactggcttactccgtcaagaaaatgatgaaggataacaacttggtgaggcacctggacgcttgtgagaccatggggaacgctacagctatctgttccgataagacggggaccctgacgatgaacaggatgacggtcgttcaggcctacatcaacgaaaagcattataaaaaggttccggaaccagaagccatcccgccaaatatcctgtcctatctggtaacaggaatttctgtgaattgtgcttatacatcaaaaatattgccaccggagaaagagggtggattacctcgtcatgtggggaataaaacagaatgtgccttgttgggatttctcttggatttaaagcgggattatcaagatgttagaaatgaaataccagaagaagcattgtacaaagtctataccttcaattctgttaggaaatccatgagtacagtcctaaagaattcagatggaagtttccggatcttcagcaagggtgcatctgagataattctgaaaaagtgtttcaaaatcttgagtgctaatggtgaggccaaagtgttccgacccagagaccgagatgacattgtgaagacggtgattgagcccatggcatctgaaggcctgagaaccatatgcctagcgttcagagacttccccgcaggagagccagaaccagagtgggataacgagaacgatgtcgtcaccggccttacttgcatcgctgttgtggggattgaagatcctgtgaggcctgaggtaccagaggcaataaagaaatgtcagagggctggaattaccgtgcgcatggtcactggtgataatattaacacagctcgggccattgctaccaaatgcggtattttacacccaggggaagatttcctgtgcttagaaggtaaagattttaaccgaagaatacgaaatgaaaaaggagagattgaacaagagaggatagacaagatttggccaaagcttcgagtgcttgcaagatcatctcccactgacaaacatacactggttaaaggtataattgacagcacagtctcagagcaacgccaggttgtagctgtgacaggggatggtacaaatgacgggcctgcgctgaagaaagcagacgttggctttgcaatgggcattgctggaactgatgtggctaaagaagcatctgatatcattctcacagatgacaacttcacaagcattgttaaagcggttatgtggggacggaatgtctatgacagcatctcaaaattccttcagttccagcttactgttaatgtagtggccgtgattgtcgctttcacgggcgcttgtattactcaagactcgccactgaaggcggtacagatgctctgggtcaacctcatcatggacacgctggcctccctggctctggcgacagaaccacccaccgagtcactcctgctccggaagccttacgggagaaacaagcctctcatctcacgcacaatgatgaagaatatcttgggccatgcgttctatcagctcgtagtggtcttcacgctcttgttcgctggagagaagtttttcgatatcgacagtgggaggaacgcccctctgcatgctccaccgtcagagcactacaccattgtgttcaacacctttgtgctgatgcagctcttcaatgaaataaatgcccggaaaattcatggggaaagaaatgtgtttgaagggatcttcaacaacgccatcttctgcacaattgtcttaggcacctttgtggtgcagataataatcgtgcagtttggcgggaagcctttcagctgctcagaactttcaatagaacaatggctgtggtccatattcctgggaatggggaccttactctggggccagcttatttcaaccattccaaccagccgcttaaagtttctaaaagaagctggccatgggacacagaaggaagagatccctgaggaggaattggcggaggatgttgaagagattgaccatgccgaacgggagttgcggcgtggccagatcttgtggtttagaggcctgaacagaatccaaacacagatggatgtagtgaatgctttccagagtggaggttccattcagggggctctaaggcgacaaccctccatcgccagccagcaccatgatgtaacaaatgtttctacccctacacatgtagtgttttcctcttctactgcttctactcctgtggggtatccgagtggtgaatgcatttcgtagctctttatacgaagggttagagaagccagaatcaagaagttcaatccacaactttatgacacaccccgagtttaggatagaagattcagagccgcacatcccccttatcgatgacactgatgctgaagatgacgctcctactaaacgcaactccagccctccgccctctcctaacaaaaataacaatgccgttgacagcgggatccaccttacaatagaaatgaacaagtctgctacctcttcgtccccagggagcccactgcatagtttggaaacatcactctgattgtaagctgaacgttaacacactagccgcactgtaaagaaacaaattgaaactgagtcttttcacacattgtgacggacaagatggcgttcttgtctccggacttcaacagaagacacacttgtacgaatgtagatttattttttt

SEQ ID NO: 810 - DNA, 1110 bp, Rattus norvegicus
gttcgaacggaaggtcgtccctgtgaccgactaggtagttggagcagctgtcgccatgttgtcggtcgctgcccgctcgggcccgttcgcgcccgtcctatcggccacgtcccgcggggtggcgggagcgctgcggcccctgctgcaaagcgcggtgcccgccacctcggaaccaccggttctggacgtgaagcgacccttcctgtgccgtgagtcgctgagtggccaggccgcgacccgtcctttggtggccacagtgggcctgaatgttcctgcttctgttcgttattcccacacagacatcaaggtgcccgacttctctgactatcgccgtgctgaagttctagatagcacaaaatcttctaaagagagcagtgaggctagaaaaggcttctcttacttggtaactgcaactactactgtgggtgttgcatacgctgcgaaaaatgcagtctcccagtttgtttccagcatgagtgcttctgcggatgtactggccatgtcgaagatcgagatcaagttgtctgatattccagaggggaagaacatggcttttaaatggagaggcaaacctctgtttgtgcgccatagaaccaagaaggagattgaccaggaagctgcagttgaagtgtcccagttaagggacccacagcatgatttagagcgtgtaaagaagcctgaatgggttattctgatcggtgtctgtactcatcttggttgtgtacccattgcaaacgcaggagattttggtggctactattgcccctgccatgggtcacactatgatgcttctggcaggatcaggaagggccctgcacctctcaacctggaagtacctacctatgagttcaccagtggtgatgtagttgttgtgggttagacacttggactcagggcctaggtttctttcggtcttcatgtcccctcagaagagttgagagtaagccttgtgtacttctaggttggttgatttaaaatatttaagaattgttaataactattggcaaacattaatgtgaagtaattgaattcactgttgaatattatcaagcattagcataataaaaccactgttgaacatcattaaaaaaaaaaaaaaaaaaaaaaaaa

SEQ ID NO: 811 - DNA, 1303 bp, Rattus norvegicus
gtggcggtctgagcgagcgcgcccttgcttcaaagcggtagcgactctagcgcctccggctaggctccaacccttctctaccctacgtctcaatagccacaccgcagtctccggcctcaagcgacccaggctatcttccagtcccgggactccgggtactgcggtccccagaaccgcccgtccagggaccaacccaagttccgcaggccgcggcggccgccaatgggggtggagggctgcaccaaatgcatcaaatacctgctcttcgtcttcaatttcgtcttctggctggctggaggtgtgatcctaggtgtagctctgtggttgcgccatgatccacagaccaccaccttgctctacctggaactgggagacaaaccagcacctagcaccttctatgtgggcatctacattctcattgctgtgggagctgtgatgatgtttgtaggcttcctggggtgctatggggccatccaggagtcccagtgcctgctggggacgttcttcacttgccttgtgatcctgtttgcctgtgaggtagctgcgggcatctggggctttgtaaacaaagaccagatcgccaaggatgtgaagcagttctacgaccaggcccttcagcaggctgtgatggatgatgatgccaacaatgccaaggcagtggtgaagaccttccatgagacgctcaactgttgtggctccaatacgctgaccacactgaccaccgccgtgctgaggaacagcctgtgtccctcaagcagcaactcattcactcagcttctgaaggaagactgccatcagaaaatcgatgagctcttttctgggaagctgtacctcattggaattgcagccattgtggtagctgtcattatgatcttcgagatgattctgagcatggtgctgtgctgtggcatccggaacagctccgtgtactgaggcccttcgcttcgcaccagagggtccctggaatgaccagagggcaccttggggggcatggcctgtgtatatactatttctgtattactctgctacacttagcctttttacttttgagtcttttttgttctgaacttttcctgtcaccttttggagccgacaccacacataggtggcgtatgtggggacgtagaggtggagctggccctagctggcagggccctgtacttctgggacccctggagagttctgcctgctgagccaaacctcctccatagctacttgtccagaggccacatagccaagctagaaggccatgtccacccactctgcccactgtgggtcacatcgctcccatctttttaatccg

SEQ ID NO: 812 - DNA, 315 bp, Rattus norvegicus
tttccagtgggtttttattagtagttgcatcatgattcagggtcccagggtagggaccatcatatactgagggcccccttttctaacggggagaagggcaaagagcagaggaaaggtgggcggagccaggtcagatcttcccaggaaatgtgccttcggctatgcgggcatcccaggctgagacccatgagacggggcaaagggacttgtacactcgccgggaccactcccaccctcgtgccgaattcttggcctcgagggccaaattccctatagggagtcgtattaaattcggaatcatgtcaaagctgtttc

SEQ ID NO: 813 - DNA, 557 bp, Rattus norvegicus
gatctaagctttattggattagtaggcattatacagagactgcaagtcattattggtccggcgcaaatacaggtgtttattccaaggtgaaatgatagcacaaattgacagttttactgctacttgaactatttctttaaggtggcttgctatggacacaatctccctcaatacccattcaacacagtctttgcttttacctctcccttcagctgagggattcaaaatatctaaaggaagtttgtaaagaacccttctgtatcagaggtagttttgtgcctacattatgcatgatagaagatatttcaacaaaggcttcataaaaaaagggggcagaagagatacaccagagtagagttgtgatcagtgatttttttcagctcattggttacagtggcgaaagtattaaccaaaatttagaatagtctttttgtctatttagtaacaaagcatgcagtagcctgtgtagacagtagcttttaataacaaccttaaatttggcttgagcaccaaggatgcattttaaaaagtataaagtacatttatatgcaatgact

SEQ ID NO: 814 - DNA, 1348 bp, Rattus norvegicus
cttcagagagttgatccttgtgcaatggcgccttccaggaagttcttcgtcgggggcaactggaagatgaacgggaggaagaaatgcctgggagaactcatctgcactctgaacgcagccaagctgccggcagacaccgaggtggtttgtgcaccgccaaccgcctacatcgacttcgccaggcagaagctggatcccaaaattgctgtggctgcacagaactgctacaaagtgaccaatggggccttcactggggaaatcagtcctggcatgatcaaggacttaggagctacctgggtggtgctgggacactctgaaagaagacacatctttggggaatcagacgagttgattgggcagaaagtgaaccatgccctatccgagggactcgaggtgatcgcctgcattggggagaagttagacgaaagggaagctggcatcactgagaaggttgtttttgagcaaaccaaggccatcgcagataatgtgaaggactggtgcaaggtggtcctggcctatgaaccagtatgggccattgggactggcaagactgcaacccctcaacaggcccaggaagtacacgagaagctccggggatggctgaaatgcaacgtctctgagggggtggctcagtgcactcggatcatttatggaggttctgtgactggagcgacttgcaaagagctggcaagccagcctgatgtggatggcttcctcgtgggcggtgcatctctcaagcctgaattcgtggacattatcaatgccaaacaatgagcactgctcatccccctaccttcctgcgtagctggaccaggttgcccagaagtttagtaactgctcctgccagtcacatgcttctgataacatcatcaactccatcttgtgacctaatccatactgtaccttcctgagcctcttacctccccataatagttgggaccaggccaatccctttaccacttacaatgggtaaaatcaaatatgtcaccaagatggctcctagagggaagagtagaactagctgtcctttgggcctaatgggtgaaacggccttccattggtttgggatggaaactcacagctggacacaggaagtaggcttcttgtcactttggcctgtcacttagatggccttggctctagcttcactcccaagccctactggatgtgtgatgcagagattcagagtcttccggtctgaatttcagtgtacattaaggccaagatccttttactcttagaggcctgggatatcccctccctgtagtgccgaagcccttgtattgtgtttgtgaaccatcctacatataagggaaataaacacctgggcctaaaaaaaaaaaaaaaa

SEQ ID NO: 815 - DNA, 600 bp, Rattus norvegicus
gtggtcgccgtcatgctcgccgctgccctccgtcgctgtaccgcagccgcggccgcccgaggccttctgcaccccgtctcggctcccagccccgctgccgctgtctgttccattcgctgctattctcatgggtcacatgagacagatgaggagtttgatgctcgctgggtgacatacttcaacaagccagacattgatgcctgggagttgcgtaaagggatgaatacacttgttggctatgatctggttcctgagcccaaaatcattgatgctgctttgagggcatgtagacggttaaatgattttgctagtgctgttcgcatcttggaggttgttaaggacaaagcaggacctcataaggaaatctacccctatgtcatccaggaacttagaccaactttaaatgaattgggaatctccactccagaggaactgggccttgacaaagtgtaaactcccttcgatgggcttcccaaggacttaactgctattgctacttgattgaaacagttgcctggaaatgttttatttgaacaaattttcctttgagtatcaaaccatgtaacttggactttaataaagggaaatgagtttgacccg

SEQ ID NO: 816 - DNA, 965 bp, Rattus norvegicus
ccgaggtgctggggccagactagttgtctctggggagcctgagcaagcatggatcaagaggctgtgggcaatgttgtgctcctggccatcgtcaccctcatcagcgtggtccagaacgcattcttcgcccacaaggtggagcttgaaagcaaggcgcaaagcgggagaagcttccagaggacggggactcttgccttcgagcgggtctacactgccaaccagaactgcgtagatgcgtaccccactttccttgtggtactctggactgcaggactactttgcagccaagtccccgccgccttcgctgggctgatgtatctgttcgtgaggcaaaagtactttgtcggctatctgggagagagaactcagagcacccctggctacatattcggcaagcggatcatcctattcttgttcctcatgtcccttgccggcatcctcaaccattacctcatcttcttcttcggaagcgacttcgagaactacattagaactataaccacgacgatctccccgctgcttctcatcccctgatggctggataccggagtaggacgatcgccagatcaatagagacgcatcctaacctacccccgcgaaggcttctgctcctcctcagctgtagatgctgtaaatctagcggccctcggggctccgccgcatccgttaactttgcttttccgggaagaaaataatcttgcgctagctccacccctcggatggggcagtggtccaggatttactgtctagatccatcttgtacttctccgggcttatcctgctctctgaaggtgtcttgtgatcagatatgtgttttcctaaaatgaagggcatagacaaaattttggcctatggctctgtttggggtggtttttctgtattagctactagtgtttcttcaacttacatgatgataattaaaatcacaatatccataaaaaaaaaaaaaaaaaaaaaaaaaaaaa

SEQ ID NO: 817 - DNA, 1142 bp, Rattus norvegicus
ggggcagtcggatcccggcagcagctgcggcggctctgttcttctgtagctcttttctgtctccctttcgtttccggaaacatggcctctggtgtggctgtctctgatggagtcatcaaggtgttcaatgacatgaaagttcgcaagtcttcaacgccagaagaagtgaagaaacgcaagaaggcagtgctcttttgcctgagtgaggacaagaagaacatcatcctggaggagggcaaggagattctggtaggagatgtggggcagactgtggacgacccctacaccacttttgtcaagatgctgccagacaaggactgccgctatgctctctatgacgcaacctatgagaccaaggagagcaagaaggaggacctggtattcattttctgggcccccgagagtgcaccccttaagagcaaaatgatctatgccagctccaaggatgccatcaagaagaaactgacaggaatcaagcacgaattacaagctaactgctacgaggaggtcaaggaccgctgcaccctggcagagaaactaggtggcagcgccgtcatttccctggagggcaagcctttgtgagccacctccagccccctgcctggagcatctagcagccccagacctgctcttgggtgttgcaggctgcccttttcctgccagaccggaggggctgggggggttccagcagggggagggttttcccttcaccccagttgccaaacatccctcccaccccctggaccgtccttttccctccatccctgacggttctggccttcccaaactgcttttgatcttctgattcctcttgggttgaagcagaccaagtcccgtcctaggcacccagtttggggggagcctgtattttttttttttaacgacacccctactcctcatctgtcccatcccatgctgccaacttctaaccacaatagtgactctgtgcttgtctgtttagttctgtgtgtaaatgaactgtggaaatgaccctccctgcaccagctggttgccctcccctttcccttgatcttggccactcatggaagcaggaccagtaagggaccttcaatttaaaaaaaaaaaaaacacaataaaaaggctaattaactaaaaaaaaaaaaaaaaaaaaaaaaaaaaaa

SEQ ID NO: 818 - DNA, 2528 bp, Rattus norvegicus
gagcccgcgctccactcctttcgtccttcccggtgactttccctccttgtccctggtccatctcgccagaggtcatagcaggcagagtggtgcagctacagcttgaagcagcagctgcggggttcgctgagccccccgggaggcgatcggagcgcggggagagcaggagtgcggccacgcgcccacctctaggtgcggggctcggagccgcccagcccgcgcgcgccctcctccctcctccctcctccctccgcccccgccgcacctccccctcctcccgctctgcttaggctgctccgcggcgcgcctcgcactcggagagccgcagcggcagcggcgcgtctcgcctttggagacagagccgggccgcggggacaccgagcagtcgccgcgaggacgccagggcgcgcgcagcactcgctttccctcggcctcggccgccactgctgagcagacaccatggcccgcggaaaagccaaggaggaaggcagctggaagaaattcatctggaactcggagaagaaggagtttttgggcaggaccggtggtagttggtttaagatccttctgttctacgtgatattctatggctgcctggccggcatcttcatcgggaccatccaagtgatgctgcttaccatcagtgagctgaaacccacgtaccaggaccgtgtggccccgccaggattgacacagattcctcagatccaaaagactgaaatttccttccgtcctaatgaccccaagagctacgaggcctatgtgctaaacatcatcaggttcctggaaaagtacaaagattcggcccagaaggacgacatgattttcgaggattgtggcagtatgcccagtgaacccaaggagcggggagagttcaatcatgaacgaggagagcgcaaggtgtgcaggttcaagcttgactggctggggaactgctctggtctcaatgatgaatcctacggctacaaagaggggaagccctgtatcattatcaagctcaaccgaatgctgggcttcaaacctaagcctcccaagaatgaatccttggagacttaccctctgacgatgaagtataatccaaacgtcctacctgtccagtgcactggcaagcgcgatgaggataaggataaagttggaaacatagagtactttgggatgggcggattctatggctttcctctgcagtactatccctactacggcaaactcctgcagcccaagtacctgcagcccctgctggccgtgcagttcaccaacctcaccttggacactgaaatccgcattgagtgtaaggcgtatggtgagaacattgggtacagtgagaaagaccgttttcagggacgctttgatgtaaaaattgaagttaagagctgatcacaagcacaaatctttcccactagccatttaataagttaaagaaaaagatacacaaacctactagtcttgaacaaactgtcatacgtatgggacctacacttaatctctatgctttacactagcttctgcatttaataggttagaatgtaaatttaaagtgtagcaatagcaacaaaatatttattctactgtaaatgacaaaagaaaaaaataaaaattgagccttgggacgtgcccatttttactgtaattagactccgtaactgacttgtagtgagcagtgttctggcccctaagtatcgccgccgtctgttttatttagtgtacagtactataggtgcgcactctggtcattttccaagccatgttttatcatatctgttttctactttccgtgagcgaggtttgctgtccaaggtgtaaatactcatgggaataaaactggcatggtactttcccttcctttctcattttcttggctctgagatttcaaaggtaacggcccatcaacaagcatttttaacacactccatagtctttccctgtggtatcaggtctttactattgtttttctttgtttcctggggctggggggtgggctgtcgtgggggaactgccctttaaattctaagtgacgctgcagaaaaacaacggtgatgggttgtgttgtgctccgtgctgagtgctgtctcgccatctctccccttgtcctccagtgtgctccgaagctgtgtctgatctggatctgcccgtcactttggctagtgatggggctagttaatttgcttagtacatttccttttccttctttcctttctctggaggcatcatgtgctggtgctgtgtctttatgaatgttttaaccattttcatggtggaagaattttatatttatgcagttgtacaattttatttttttctgcaagaaaaagtgtaatgtatgaaataaaccaaagtcacttgtttgaaaataaaatctttattttgaactttataaaaagcaatgcagtaccccatagactggtgttaaatgttgtctacagtgctaatccatgttctagcatatgtagtgattgccaggagtacagtgctcttgttggtcttgtgtcagtcaggttaacacaatggacaataaaagaatgaacacattc

SEQ ID NO: 819 - DNA, 2650 bp, Rattus norvegicus
ctggacgaagctgagtcctatacagcgctcgcagctctcccgatcatggcttcttcgagttccttcacctattattgtcctccatcttcttcccctgtttggtcagaaccgctgtatagtctgagacctgagcacgcgcgggagcggttgcaagacgactcagtggaaacagtcacgtccatagaacaggccaaagtagaagaaaagatccaggaggtcttcagttcttacaagtttaaccacctcgtaccaaggcttgttctgcagagggagaagcacttccattatctgaaaagaggccttcgacaactgacagatgcctatgagtgtctggatgccagccgcccctggctctgctactggatcctgcacagcttggagctcctcgacgaacccatcccccaaatagtggctacagatgtgtgtcagttcttggagctgtgtcagagtccagacggtggctttggagggggccctggtcagtacccacacctcgctcccacgtatgcagctgtcaacgcgctatgcatcattggcacggaggaagcctacaacgtcattaacagagagaagctccttcagtacttgtactccctaaagcaaccggatggctcttttctcatgcacgtcggaggagaggtggatgtaagaagtgcgtactgtgctgcctcagtagcctctctcaccaacatcatcactcctgacctcttcgaaggcactgctgaatggatagcaaggtgccagaactgggaaggcggcattggcggggtgccagggatggaagcccacggtggctacaccttctgtggcttggctgcgctggtgatcctcaagaaggaacgttctttgaacctgaagagcttgctacaatgggtgacaagccggcagatgcggttcgaaggaggatttcagggccgctgcaacaagctggtggacggctgctactccttctggcaggcaggacttctgcccctgttgcaccgggcactccacgctcaaggtgaccctgccctcagcatgagccactggatgttccatcagcaggcgctgcaggagtacatcctcatgtgctgccagtgtccggctgggggtctcctggacaaacctggcaagtcacgtgacttctaccatacttgctactgcctgagcggcctgtccattgcccagcattttggaagtggagccatgctgcacgatgtggtcatgggtgtgcctgaaaatgttctgcagcccactcaccctgtgtacaacatcggacctgataaggtgatccaggccaccacacactttctgcagaagccggtcccaggctttgaggaatgcgaagatgcggtgacctcagatcctgccactgactagaggaccccatggctcccccaaatcccccgtcagacaaggtttctccgtttgggtacatagcacagtccgtgctacttgagccttggccactgtggagttgtggtttctttgtcctttcctgtcaaacaaaacaaagccatcagctctgggttggaatacacaatggtgtgattttaaaaattattttcatacctgtcaaaccaaaactctgggagccgatgtagtaagcagggttggagagcaatgcatgctgggaagcagcagcctcctccagcagccaggcccacaatgctgaaatggaaggtgtctgtgagtatctccacatcacagccactgctgtgcctcccacctacacaccattcagtcagcagatgggctcctctctggtataaatgtcagctctgtgcaagggcggggctgtgggtccagccaatacatgctctctggaaaacagcactgggctccagtgggcatattcatacttgtctcttttaccccagtcatttgcgaaggacaggggccaggaatgaagaagggtcttagattgagccttccccacaacctgaggagaactgatctcatatttctccaaggccatgtttgtatgagcaagacttgttttgccctaagtatgacgactagacccaggtaatcaattatgagtggaaaatcaacctctaggtgaactctgtgccagaggaagcagcctccccagtgcccagcccctgcctctccccatcatgtaccaggagaggccctcctcacggcagtgctgcagcccaggctccttctagtcctttctccccacccaccctccaagacagtgctcttttctcatccagggtgttaacactactaaggcttcaccgtaatcgatcactcaggatttactcctgccctgcccactccaggctctctgaaacacagtcaagtgctaggcaagctagctgctgctgggacagtgaccagcaggaaggcaagtgctgtccgtgtgctgaattctggaactgcctctgcaccggctgagtttgctcacctatccactgctacagtcatagcaagctcatgccgctgtcccagcctgtgcgagcaggcagacgggagcttggagatgcagcatgaggttcttccccaaaccactggccatttgctgcctctgattccccattgctttggtgtactgggctatgtattacctccttgaaataataaaagagtaacattttcaaaaaaaaaaaaaaaaaaaaaaaaaaaaaaaaaaaaaaaaaaaaaaaaaaaaaaaaaaaaaaaa

SEQ ID NO: 820 - DNA, 376 bp, Rattus norvegicus
tttttttttttttttttaattcactcaaaattcttcagtttttacaaaactaacagggtggagtagggaagggagcagggaggcagccgcaggggtgggtaggcggagaggcaggctatgcttctgtcttcacctgagcctggttgcctgccacattgttcggctcacccttcatctcagcatcagtgggatggtccacctcaaatacaagtgtggcatttggttgccacagcaatatcccaagccttgatgacctccccttttcccaggtcaaaggagaatttgtccttgcggtccaaactggagtcaaactttgtgccatctagcagccagccagtgtagtggacaaagactcggtcccccctcgtgccgaatt

SEQ ID NO: 821 - DNA, 1290 bp, Rattus norvegicus
cgcagccacctcagccccctgcggcggctccctcccggcctttcctcctacgagcagcatgaaagccttcagtccggtgaggtccgttaggaaaaacagcctgtcggaccacagcttgggcatctcccggagcaaaaccccggtggacgacccgatgagtctgctctacaacatgaacgactgctactccaagctcaaggaactggtgcccagcatcccccagaacaagaaggtgaccaagatggaaatcctgcagcacgtcatcgattatatcttggacctgcagatcgccctggactcgcaccccactatcgtcagcctgcaccaccagagacctggacagaaccaaacgtccaggacgccgctgaccaccctgaacacggacatcagcatcctgtccttgcaggcgtctgaattcccttctgagcttatgtcgaatgacagcaaagtactctgtggctaaataaatggcatttggggactttttcctttttttttttttttttttatttttactttctctttttcttttgcacaacaagaagtctacaggatcttttaagactgttgttttgttctgctttgttatcaaccatttcaccaggagaacaagttgaatggacctttttaaaaagaaaacggaaggaaaactaagagtgatcatctcccccaggtgttctccggcctggactgtgataaccgttatttatgagagactttcaatgccctttctacagtcggaaggttttctttatatacttattcccaccatggggagcgaaaatgttaaaaaaaaaaaaaaatcacaaggaattgcccaatctaagcagactttgccttttttcaaaggtggagcgtgaataccagaaggacccagtattcggttacttaaatgaagtctttggtcagaaatggcctttttgacacgagcctactgaatgctgtgtatatatttatatataaatatatatatatatattgagtgaaaccttgtggactctttaattagagttttcttgtacagtggcagagataactttctgcattgaaatgtaatgacgtacttatgctaaactttttataaaagtttggttgtaaacttaacccttttatacaaaataaatcaagtgtgtttgtcgattgctcgctttatttcagacaaccagtgctttgatttttttttatgctatgttataactgaacccaaataaataccagttcaaatttatgtagactgtattaagattataataaaatgtgtctgacatcaaaaaaaaaaaaaaaaaaaaa

SEQ ID NO: 822 - DNA, 1258 bp, Rattus norvegicus
gggggaacgcgtcagacttggccaactgaggctgggctggacccctattgtggaatcgcggacacttcctacagttgtcgaacgcaatccgtctacaccaccttgtgtcactacctaccaccatgggtttggagctctacctggacctgctgtcgcagcccagccgcgcggtctacatcttcgccaagaagaatggcattccctttcagttgcgtaccgtggatttactcaaagggcagcacttgagcgagcaattctcccaggtgaactgcttaaagaaagtgcctgtcctcaaagacggaagcttcgtgttgaccgaaagcactgccatcttgatttacctgagttccaagtaccaggtggcagaccactggtacccggccgacctacaggcccgtgcccaagtccacgaatacctgggttggcatgccgacaacatccgtggcacctttggagtactcctgtggaccaaggtgttggggccactcattggggtccaggttcccgaggaaaaggtggaacggaacagaaatagtatggtcttggctctgcaacgtctggaggacaagttcctcagggacagggccttcattgctggccagcaggtgacgctagcggatctcatgtctctagaggagttgatacagccggtggctcttggctgtaatctgtttgaggggcggcctcaactgacagcgtggcgagagagggtggaggcgttcttgggtgctgagctatgtcaggaggcgcacaaccccatcatgagcgtcctgggacaggcagccaagaaaacattaccagtaccccctccggaggcccatgccagcatgatgcttcgaattgccaggattccctgagtggttttttttccctgagtatttttattgctataaagactcattttgtattttgcctctttgttttgttttgtttttgtttcttcttgtcccaacctttttttttttttttttttttctggctccttttctggctctgggaggagctttgctcaaaagggacaccacctatccttagcatgcttctcttgaggtacagtatgcacaaccaataggagacccaagtcaataatatataaaaggtgcttaaaaaaaaaaaagcaaacagtaacacacacgaagaaatcaaccaaaaattggtggacatctgttttttattataatatagattctgaatattttaaggaataaagagttattgttttattacattgccctctaatctgtatggaataaattat

SEQ ID NO: 823 - DNA, 1636 bp, Rattus norvegicus
gagctggctttgcatcaccgaagctgggacctgggctgtacagcagaatggcagacatgctgggactgatgcagaggctggaattcgccgtcagccggctcgagcggctgtcctcagggttacacgaacctcccggaggctgtggggaagttaacagcctcagtagaggcatagtagcaccatccgtggaagcctttgacaaactgataaacagtatggtggccgagttcttaaagaacagccgagtccttgctggcgacgtagagactcacgcggaaatggtacatggtgctttccaggcgcagcgtgcttttcttctcatggtctctcagcaccaacaaccccaggagaatgaagttgctgtccttctgaaacccatatcggagaagattcaagaaatacagacattccgcgagagaaaccgggggagcgacatgttcaaccacctctcggcagtcagcgagagcatcgccgccctggggtggatagccgtgtctcccaaacctggtccatatgtcaaggagatgaacgacgccgccaccttttacactaacagggtcctgagggactacaagcacagcgatctgcgccacgtggattgggtgaggtcctatctcaagatctggagcgaactgcaagcctacatcaaggagcaccacaccacaggcctcacttggagtaaaactggtcctgtagcatccacagcatcagcgttttccattctctcctctgggcccggtctccctccaccacctccaccaccacctcctcctggaccacctcccccttttgagaatgagggcggaaaggaggagccctccccgtctcgctcagctttgtttgcccagctaaatcagggagaagccatcacaaaagggctccgacatgtcacggacgacaagaaaatatacaagaatcccagcttgagggcccaaggacaaattcgatctccaaccaaaacccgcacgccgagccctacatcttcaaaatcgaattctcctcagaaacatgctccagtgttggagttggaagggaagaaatggagagtggaataccaagaggacaggaatgaccttgtcatctcagagactgagctaaaacaagtggcgtacattttcaaatgtgacaaatccactcttcagataaagggaaaagtaaactccatcaccgtcgataactgcaagaagtttggcctggtgttcgaccatgtggtgggcatcgtggaagtgatcaactccaaggacattcagatccaggtaatggggagagtgccaacaatctccattaataagacagaaggatgccacctgtacctcagtaaagatgcgctagactgtgagatcgtgagcgccaagtcgtccgagatgaatgtcctggtccctcagggtgacgattatagagaatttcccattcctgagcagttcaagacgatatgggacggatccaagctcatcaccgaacctgcagaaatcatggcctgacctccaagagatatccttccccgagtccctccagctggcagaagcaaacagctaataggagctagatttcaccatagccccggcgtccatgtcagcgtcctgcagttctgtgccgtggaaaacagtttcttttctggcaggcttttatgggcgtt

SEQ ID NO: 824 - DNA, 3320 bp, Rattus norvegicus
gaattcggcacgagctgcgaagtgactggtcggtcgtgtaggtgctgcagccaacgagcccggtggcgggcaagggacacgagcaggacccccggctccgaagaattgcggcccgcgccgccgcgtcacgcacactctgggcgccgcgagatacacataacgatactaggttttcgccgcatcttggaattcatcgacacctaagatgccacctgcgattggcgggccagtggggtacacccccccagatggaggctggggctgggcggtggtagttggagccttcatttctattggcttctcctatgcatttcccaaatccatcactgtcttctttaaagagattgaaattatattcagtgcaacgaccagtgaagtgtcatggatatcgtccatcatgctggctgtcatgtatgccggaggtcctatcagcagtatcttggtgaataaatatggcagccgtccagtaatgattgctggtggctgcctgtctggctgtggcttgattgcagcttctttctgtaacacggtgcaggaactttacttctgcattggtgtcattggaggtcttgggcttgctttcaacttgaacccagctctgactatgattggcaagtatttctacaagaagcgaccattggccaatggcctggctatggcaggcagcccagtgttcctctctaccctggctccacttaatcaggctttctttggtatttttggctggagaggaagcttcctaattcttgggggcctcctcctcaactgttgtgtagctggatccctgatgcgaccaatagggcctcagcaaggcaaggtggaaaaactcaagtccaaagagtctctccaggaagctgggaagtctgatgcaaatacagatctcattggaggaagtcccaaaggagaaaagctgtcagtcttccaaacagttaataaattcctggacttgtccctgtttacccatagaggctttttgctgtacctgtctggaaatgtggtcatgttctttgggctctttacccctttggtctttcttagtaattatggtaagagtaagcatttttccagtgagaagtcagccttcctcctttccattttggcttttgttgatatggtggccagaccgtccatgggtcttgcagccaacaccaggtggatcagacctcgagtccagtacttttttgctgcttctgttgttgcgaatggagtgtgccatttgctggcacctttgtctacgacctatgttgggttctgcatctacgcgggagtctttggatttgcctttggttggctcagctccgtattgtttgagacgttgatggacctcgttggaccccagaggttctccagtgctgtgggcttggtgaccattgtggaatgttgtcctgtcctcctgggaccaccacttttaggccgcctcaatgacatgtatggagactacaaatacacatactgggcttgtggcgtgatcctcatcatcgcaggcctctacctcttcattggtatgggcatcaattatcgacttgtggccaaagaacagaaagcggaggaaaagaagagggacggtaaagaggacgagaccagcactgatgttgatgagaagcccaagaagacaatgaaagaaacacagtcgccagcgccactgcagaacagctctggagaccccgcggaggaggagagcccagtctgacctgtggagcatgaagagagcaggtgtgacccgagacatccgaaaccattctgctggcccctagtctaccagtggtgccccgtgcagacagtggacaattgtgtggaaaacccaccagggtgttcattggtgggatttttttttttcactccttaccaatgcctggatttaaaatatactctgctttaggtagggagtggttgacaaagaatatggggaagaagcagtgatctgtttgtttgtttgtttgtttgtttgtttgtttgttttaatcttagcttttaacagtgtcatgaagattataatatgtgccttaagttttagtttttagaactctttagagagccttaacttttaaaaccattctgctgaattcatctgtttaaaacgtcattttaagaggaaaaataacaactagcttgcttgaggtaactaaccttaatcttgttttgttgttgttgtaatgctttgtcagacagacattgttaccggaacatttatgaatagaaatactgcttaaaggtcacaggtttataaaatactgagctaaagtatttttctagcattatagttgcctggtacatctgctgctaggtatatatttgagaaatttgaagcataaaattctggatcttggcagttccagccacagcctgtcacctgctgggcacctcttctggaatgctcactacagtctagtgctaaggtgttgccactgaattgatacctttgctcctattcagagacactgtgtggttagaagtaattggccatttttgaaatcaaatgcaaaaagttagtattaaaatctacaaaacaattccttaacacgtctgatttaatgtaaacagtatttcaagcatcagctgaattcagcgtaggttgtcccaaaaccttagttatggtgtgatactctgggtatgtgtgggtttgaggggctgtgagtgaggtcttggttcttaggattgacccagggccatgagcatgcgaagtacatgctgtacggccgagccacaacccacaggcaccctggagtcctcctagtccctgagaccttttctctgatttttgatagctcatttatttactgatagtttagagctgtatgtgagatatccagtacagggtgaatgtatgcgctctttgttttttacattgttttcagtatttgcaaaaccgagagggtcagtgtttggcctcagggaagccaataaagataaaatagggtggaagtttgcagactttcagtaagtacccacctcccgccacacacaccagacttacaggggaacttctatcatgcttacgattatttgacgcagtcttacctccacatcttaactttcacgaccctttcacttacctgacatgtagaaaaatgggtttaatatatggataggaggaaagatggaccagattggaattacagtgggttttttttttttaaacctgatgttttctgaatagaggcagaaaaaataagacatatgacactgaattggacgatgcatttaaaataccattgtaatgacagggtgaatacagatttacaaccttgtgtaagaagctgactttttccaaataaaacatttattttatttttagaaaaaaaaaaaaaaaaaaactcgag

SEQ ID NO: 825 - DNA, 561 bp, Rattus norvegicus
aaatcctgatactttatttcttatatcctagctatcaaatcccatatgaattttcagcattaaatagtgacacatatcaagtttcagagatttattcatcagtgtaataaactcaaaaaaaaatcaacatgatttcatgcattcggagacatagttcctgcttaagtggaaaattgtgcggatggcttctgaaagaccttcattgtaagcagctttgcagtgaacttcacagtttagaagtctgggccttcttttttcagtttgctgtagtccacgttcacagaatagaacttatattgttcattgggacccagtttgttccaaggctctgggttattcttcctgtcccagctgacatctggattgaacaatgccaagcgcatcacatacagtgctgctccagtaccccctgctccaataaacacgaagagagggatcaagctgggatgtttcttggcttgcccgaggatctggcggagcatgtttgcggcacaggcctacctacaccgagagagaagattaggacacacactaaaccgcttctgcaacctgcctcgtgcc

SEQ ID NO: 826 - DNA, 740 bp, Rattus norvegicus
cggactcctagagacacgctagagcagataccacgatggcgccctttgcatctctggcctctggcatcctcttgttgctatcattgatagcttccagtaaagcctgtagctgtgccccaacccacccacagacagctttctgcaactcggacctggttataagggctaaattcatgggttccccagaaatcatcgagaccaccttataccagcgttatgagatcaagatgactaagatgctcaaaggattcgacgctgtgggaaatgccacaggtttccggttcgcctacaccccagccatggagagcctctgtggatatgtccacaagtcccagaaccgcagcgaggagtttctcatcgcgggccgtttaaggaacggaaatttgcacatcactgcctgcagcttcctggttccctggcataatctgagccctgctcagcaaaaggccttcgtaaagacctatagtgctggctgtggggtgtgcacagtgtttccctgttcagccatcccttgcaaactggagagtgacagtcattgcttgtggacagatcagatcctcatgggctctgagaagggctaccagagcgatcactttgcctgcctgccacggaatccagatttgtgcacctggcaataccttggggtctcgatgacccgaagccttcccctggcaaaagctgaagcctgaacactgtttacctttcctccatctttctttctcttaaatggtgaaataaag

SEQ ID NO: 827 - DNA, 600 bp, Rattus norvegicus
  misc_feature (1)..(600): n = a or c or g or t
cttaggnaccctgctagcaganaattcggcacgagtccttgaaagcttacaaaatgtgcgacgcctttgtggggacctggaaactcgtctccagtgagaacttcgatgattacatgaaagaagtgggagttggcttcgccaccaggaaagtggccggtatggccaagcccaacttgatcatcagcgtagaaggggacttggtcgtcatccggtcagagagtacttttaaaaacaccgagatttccttcaaactgggcgtggaattcgatgaaatcaccccagatgacaggaaagtgaagagcatcataaccctggatggtggggtcctggtacatgtgcagaagtgggatggaaagtcgaccaccataaagaggagacnagatggtgacaagctggtggtggaatgtgtcatgaaaggcgtgacttctacaagagtttacnaaagggcatnagccaagggacgaggccctggactgaaatttgcatcaaactctacaataacttgatgggatttggtggttttgntatttntttttttaagatcnattttgcactaattagcaagcaatcactttnttcttgaactgggaatttattgga

SEQ ID NO: 828 - DNA, 623 bp, Rattus norvegicus
aacggtgtcataaataagtaatataactttattaaaatgaaaagacaatattcaaaataatgcaacaaaatgaacaaatcctttgtccaatactgtacacacagtgcggagatcagtgcattttctaaagcatgttttaaccttcatttagttcatactaaaaataagctttaaatagctcaaataatgtcattcagcagtttaaactgaacagcttgttgggacatggcagcggtgtccctctgttagcaagcaccttctctttgtgcttatctatacaagataaacaatcagaggatgtaaaaattgaacacaagctacacgtctcactgactctcagggcagtgaggcagccagctgtgagttttctaagcaggaagatgctgaagtgacctctggcattaagacgttctgtgctattggtcagaagtgtttcacttaaaaagcaaacaatccccaggaaatactgaataggaaccaacaacacaagaccagcttgtgttgtaatttaaagtctcaaaaacaaaacaacatcccatacaccccacgataactctcaatcatggctaatcactgggctggtctataaaacttatacccaacactgacggccagcaccactc

SEQ ID NO: 829 - DNA, 688 bp, Rattus norvegicus
ggttgcatcgagtgcctcacagacactataaaaccaaaacggaatagaaacatctcggtggttaacagaacacaggaaagccaggtacagagtataatttgtcaaacacaatattgctgctccccgccccacccccacttcctccaatttataaaaagaagaaagaagaaaagaaaaagccatttggataaagagcaacacaaaatcaaaattggcagctcactgaatgcttaaaattcaggaaatcgtttttgtaactgaaactggatacattcaccatttctaacacttaggctatttttttttcaatacatagtttaagtccattcttcaggtgaaaaaaaaacatgtctttaaacacaacaatcaacactgttttggtgttccttgtttgtgtgtgtgtgtgtgtgtgtgtgtgtgtgtgtgtgtgtgtggacactgatctatatactgcttctatgccattgcctagggtgggcagcatgcatgggtaagaggaagggacatgcactatgtcatccaagtgccgcccagcctctgccacagatgacagaccctgcatccctcatttctagatgagaaagccaaggctgtcaagtcataggctctggagggaagtgcgagtataaacactgcagtgtggaaatccttcaagaaggtttttaacatctacagaagctaaacattt

SEQ ID NO: 830 - DNA, 2179 bp, Rattus norvegicus
ggcaggctgtctctctctgggtttcagccgcaggactgaagccaccttctcacccctgacctgcgtgtgctgtggccaccacggaggtgtcaaggcagctgtggaagcagatccctgaggaaccttgaaatgttgatcatctggtggttctggtctctgctggccatctgtgcttctgactccttccggaaccaggcggagaacatcatgagaaccacaccggtcattgacgggcacaacgacttgccttggcaaatgctcactctgttcaacaatcagctccggaaatcagaggccaacctgagcgcgctagcggaaacacacaccaacatccccaagctgagggctggcttcgtgggaggccagttctggtccgcatacatgccttgtgacacccaaaacaaagatgctgtgaaaagaatattggaacagattgatgtcatacatcgcatgtgccagctctatcctgagaccttcgagtgtgtcaccaatagttcagacatcctacaggcgtttcggagggggaaagtggccagtctaattggcgtggaaggtggccacttgattgacagcagcctgggtgttctgcggacactctaccatctgggcatgcggtacctgacccttacgcacaactgcaacacaccctgggccgacaattggctagtggacaaaggagacgacgaggctgagagccaaggactgtcgccctttgggaagcttgtgctgaatgagatgaaccgtctgggtgtcatgattgacttgtcccacgtgtctgtggccaccatgaaggacgctttgcagctatccaaggcaccggtaatcttcagccactcctctgcctacagcgtgtgtccacacaggcggaatgtgcctgacgatgtgctgcagctggtgaagagcacaaacagtttggtgatggtgaacttctataaccagttcgtgtcctgctcagacagcgccaccttgtcccaagtggctgaccacctggaccacatcaagaaggtggcaggcgcaggggctgtgggccttggaggagattatgatggtgttaccaaccttcctgtgggactggaggatgtctctaagtacccagacctgatagcagagcttctcaggaggaactggacagaaaccgaggtcagaggcctgctggctgaaaacctgcttcgggtcttctctgcagtggaactggtaagcaatatcatgcaagttcctgaggaagagactatccctgtggagaagctggatggctcctgcaggacattctatggccactcaagggcccccagcatccacttgcagataggggccctgttggcctctctggcttccctggtcttcagtctgcatcttctgtgacatcccaaggaccagaacctcctccagtgctctccgagctcaggaagactgagcaggcccaaagtccctgttgtccatgccaaaccacatcctttcctgaagaagcagtgggcttacctggggacagctcaagacacaggcacgcaataaacacaatgtcctttaagtgctaagtaggcatctcagccctggaaggttcgtctgagcatggagagagcagattttgtgagaacagctctgggtcaaaaggacacaggagcacctaagttcttggaggggaggactggaaggaacccagaggtctgcagagggtctcatgtgagcagtgactagtttgaaatgtcatggttcatgtttcagtggctaccttccccccattgctgtgcatgtaccacatgcacacaatcccctcgcccctacacacatgtacttatgtgcacacagccacaaacgaagacactcagatgcacatctatatcacacacaggcgcatgcactctgctgacacataccataggagagtcacacatatctatctgggttctgtagtgctgggaagggacccaggtaatctgaatttggtctaatcttggaaggtaggctccagataggatgggtgcctgcactcacgggggtatcccacacagctaacagcaggttttttccagattcacaagcttatggttatcttctgtgtgttacctagcacggttggcagtgtgaagcagggtgccaggctttccagtgaggacattcaaggatgagtcttgtgaataaacttgtgagggacagcgtgaagcagctcccctgaatggcc

SEQ ID NO: 831 - DNA, 2599 bp, Rattus norvegicus
tgctgctggcgtccaagatgtcgaccaagaatttccgagttagtgacggggactggatctgccctgacaagaagtgtggaaatgtaaacttcgccagaagaaccagctgtaacagatgtggtcgagagaagacaactgaggccaagatgatgaaagctgggggaacagaaataggaaagacactggcagagaagagccggggcttatttagtgccaatgattggcagtgcaaaacttgcagtaatgtgaattgggctagaagatcagagtgtaacatgtgtaatactccaaagtatgctaaattagaagaaagaacaggatatggaggtggttttaatgaaagagagaatgttgaatacatagaaagagaagaatctgatggggaatatgatgagtttggacgtaaaaagaaaaaatacagggggaaggcagttggtcctgcatctatattaaaggaagtcgaagataaagaatcagagggagaagaagaggatgaggatgaagatctctctaaatataagctagatgaggacgaggatgaagatgatgctgatctctcaaaatataatcttgatgccagtgaagaggaagatagtaacaaaaagaaaagcaataggcggagccgctcaaagtctcgatcgtctcactcaaggtcttcatcacgctcatcctccccctcaagttcaaggtccaggtccaggtcccgttcaagaagctcttccagctcgcagtccaggtctcactccggttccagagaacattccagatcccgtggttcgaaatcaagatccagctccaggtccacaggggctcttcttccccaagaaaaagatcttactcgagttcttcatcatctcctgaaagagacaggaagaggagtcgctctagaccttcttcaccagctgttcgcaaaaaaagacgaacgagatcacggtcacccgaaaggcaccacaggtcgtctccggatcaacccattctggttcccgttcaagttcaaaaaagaaataatgtattaaaatttacatctttaaaaaacattgagtacagtgcatgaagcatattttttaggaagttgatgtctcatttggtcagaagtactacatctgctagtagaggtgcatgcctttattgcttttcaaaacaataaaactgttcatttgtgaaactgaaagtaaattgcattttaagccatactgttccccagataaatgctctgtccattatttacaaccatttacttcgtttaaaaccatcctagcgataacggagtacttttgtttcctactttaaatcctgtccttttcatttctaaatgttctattggcagagacggttgcctgggcttgcctggacttcagacacataggcaaagctagtaagctagttggagtaaccagttcctgttcatgtgggaatagtagtcaacctggttatgttctttacctatgccagtaatttcttaccagaggtaaagtacattgcaaagctgacaactgggaacaagctgagggtgccttagaatcattgtctcttaccagctttacacctcttaatgcaagaggattatagaaattacagaaggaaagggaaggttaaccacatattacttcaaaatgtctttctcaaagtttaagaaatgtggatatcctttaaataaatctagttaccaaatgttgtacttgattgataaaagatttttaaaaaggctaaatcatagttaatgagccaattgatgagagcttttgaaacttgtttctcagtgacaggctaacaaagacatgaatttaagtgaacatttgccttgtgatgtctgatttttaacattgtagatatctaagtaacagaagaattcttacttccccacaatttaagcaaaatcatttttctcacctggaaaaaaaaacatatggcttaaaatgctttcagagttttatttctcaaattaaaatctggtcacttgagatccattttgttctctggtttaaaagttataaggtttctcttaacagtcttttcagcagcaaaagcaaggtaagtatataagggacaacagttatgctggggctccttgtgagggaattacttcctgtttctcctttagtatttgtctgctgcagtttaaatataagtaaagccttctgagatgtttagtagacagatcaaacgaaatgtttttattttaaagtgagtgtttttcttctcaactgatctaaagatgaaaacaaaatatcgtacgtagaaatattttggtaatatttttacaagctttcctgtgttttttgtcttattttccttgctgcatttactgtaggttgcacacgaactcttactctcttgtaattgtgcctcagacttctcgaaagtcgactttctgagttgcccagatcttctagatccgacgtgttagccttggtttgtttttgtgctttctgtatttaaaacttgagctgtactaggcaaatgcaagattataaatttagctaataggagtttacaaacagttcagatgattatgatttgatttggtttaattgagctgtactagttcatttcataaggaaatgatactgtagacaaatgtaaataaaatctgtgagtc

SEQ ID NO: 832 - DNA, 1908 bp, Rattus norvegicus
gtgctgccgggcaggccgccatggcgaacgtggccgacacgaagctgtacgacatcctgggcgtccctcccggcgccagcgagaacgagctgaagaaggcataccgaaagttagccaaagaataccatcctgataagaatccaaatgctggagataaatttaaagaaataagttttgcctatgaagtattgtcaaatccagagaagcgggagctatatgacagatatggagaacaaggtctacgggaaggcagcggcgggggtggcggcatggatgatattttctcacatatttttggtggaggattgtttggcttcatgggcaatcaaagtagaagtcgaaatggcagaagaagaggcgaggacatgatgcatccgctgaaagtgtctttagaagacctgtacaatggcaagaccaccaagctgcagctcagcaagaatgtgctctgtagcgcgtgcagtggccaaggtggaaagtctggagctgttcagaaatgcagtgcttgccggggtcgaggtgtgcgcattatgataagacagctggctccagggatggtacagcagatgcagtctgtgtgctctgactgtaatggagaaggagaggtcatcaatgaaaaagaccgctgtaaaaaatgtgaaggaaagaaggtgattaaagaagtcaagattctggaagttcatgtagacaaaggcatgaaacatggacagagaattacgttcactggggaagcagaccaggctccaggagtggaacctggagatattgttcttttgctacaggaaaaagaacatgaggtgttccagagagatgggaatgatctgcatatgacatataagataggacttgttgaagctttgtgtggatttcagttcacatttaaacatcttgatgctcgtcagattgtagtgaaatacccccctggcaaagtaattgaaccaggatgtgttcgtgttgttcgaggcgaaggaatgccacagtatcgtaatccctttgaaaagggtgatctttacataaagtttgatgtgcagtttcctgaaaacaactggatcaacccagacaaactttctgaattagaagacctcctgccatctagaccagaagttcctaatgtaattggggagacagaagaagtagagcttcaggaattcgatagcactcgaggctctggaggtggtcagaggcgtgaagcctacaacgacagctctgatgaggaaagcagcagccatcatggacctggagtgcagtgtgcccatcagtaaactgcaggcaactgcacggtggattttctccacatttgccggatttgccagctgctggagtacctgatgagtccagatgaactgatggacatctgctgatctatgtgtaacttctaaacttggtatagtatccacagagtgtataatttaaactaaccacggagctttacgtcttcatttcgactgttctatagcagagtaaagcacttgaaataagactccctttcacatgtgggttataagtttcagtcctggtatctgcttgatttttatcagttttgtgtagagtttatgtttcctattttaaactcagatccagcattgtaaagtttgtacaattcgtcctgaagctgtgtgtttggctgcacctgcataagctgctacaaatagaataaagaattcatagcctgtatctatcattagatgcatggaaaactgggctttgcacacaatgggtttgaagctgactgggaacaatggaaaaaattacattagccatggttgtaaagttttttggcttttttttaaaaccattttgtgaaaggtttctgaaacttgataataaaaagcagttggtgtaaattaaaaaaaaaaaaaaaaaaaaaaaaaaaaaaaaaaaaaaaaaaaaaaaaaaaaaaaaaaaaaaaaa

SEQ ID NO: 833 - DNA, 2228 bp, Rattus norvegicus
catgggtgatgagcaggacaggaactgttgccagccaccttcactcctcagctgtgcagtaaccaaaccacacaactgcacatttcaactgcagccccaccttggctggcgcagacacagggcgcaggagtgaagggcgcgagcgcttcttgtgttccagactcttctcctcattcttctgggtgttcatctcgcacgacccattgcctgtaaacagggaccgctttgcctcaggcaggaactgtccgaactctgacagtaggtcctcctgaccacggaagagattggccacctctgtgaagacttcctcctcagacatgccacggaatggacgacccttagtgtgcagctgctccttctggtaggtgtgtaggatctccaggaaggacctgtagatctcagggtggtccagaaagcgggtcttgatcttgttcacatagctgatagcattgttgaactccacagagtcggactccaggggcacctggcctctgtcctccttgtaggacatctgcttgaagtcctccccacagtcaccatggctatgagagttgtcctggttgctcagaggtgactggatgttcaacttgccgttcttgggaatgtctatgcggtatccaagcggaaggaaagcattaaaccccacgatgaggtcagggtgctcatggaagagctgggacacacgcctaatcacgccgggggtgtcaatgctctggcttttgaactccttcatgatctccaggaagccgttgtaggtggcagggtcactgccaaagcggatcttcacctggtcgaggtaggtgagagcatcctccacgtgcactggcagcttctcgtgcaccccagagcccgaacgaccccagcgggagccaccgaatccccggcccgcggagcctccaccgcctgcgtgcgccattttgaaagtcgctgggtggtcgttggaagccgctacggttgtgcctcacgtttctccatgaggaaaatgctggccactgtgctgtctcaagtattttcaggaatggtccagaagccagctctcaggggactgctgtcatctcttaagttctccaacgacgccacctgtgacatcaagaaatgcgacttgtacctgttggaacagggcccccccacctccactgtgctcaccagagaggaggccctgaaatactaccggaacatgcaggtaattcggcgcatggagttgaaggccgaccagctgtataagcagaaattcatccgtggtttctgtcacctgtgtgatgggcaggaagcctgcaatgtggggctggaggcagggataaatcccacagaccacatcatcacgtcctacagagctcatggcttgtgctacacgaggggactgtcagtgaagtccattctcgcagagctgactggacgcaaaggaggctgtgctaaaggcaagggaggctctatgcacatgtacgccaagaacttctatgggggcaatggcattgttggggcacaggtacccctgggagctggtgtggctctcgcctgtaaatacctgaagaatggtcagatctgcttggctttgtatggcgatggtgcggctaaccaagggcaggtatttgaagcttacaatatgtcagccttgtggaaattaccctgtgttttcatctgtgagaataaccgctatggaatgggaacagctattgagagatcagcagccagtactgattaccacaagaaaggctttgttatccctggactgagggtgaatgggatggatattctcagtgttcgtgaggcgaccaagtttgcagctgatcactgcagatccggaaaggggcccattgtgatggagttgcagacataccgttatcatggacacagtatgagcgatccagggatcagttatcgtacacgagaagaagttcagaacgtgaggagtaagagtgatccaataatgcttctccgagagagaatgataagcaacaacctcagcagtgttgaagaattgaaagaaattgatgcagatgtgaagaaagaagtcgaggaagcagctcagtttgctacaactgatccagaaccacctctggaagatttagccaattacctctaccaccaaaatccaccatttgaagtccgtggtgcacataaatggctgaagtttaagtctgtcagttagagatttgttaaattcttcagtgggacatttatggtgaactttaggacatttttcaacattgctaatgaaaaaaaaaaaa

SEQ ID NO: 834 - DNA, 1761 bp, Rattus norvegicus
atggatccccgagccccccgccgccgacacacccaccagcgcggctacctgctgacgcgggacccgcatctcaacaaggacttggcttttactctggaagagaggcaacagctgaagattcatggcttgttgccaccctgcattgtcaaccaggagatccaggtccttagagtaattaagaatttcgagcgtctgaactctgacttcgacaggtatcttctgttaatggatctgcaagataggaatgagaagctcttctacagtgtgcttatgtctaatgttgaaaagttcatgcctatcgtttacactcccaccgtgggtcttgcatgccagcaatacagtttggcattccggaagccaagaggcctctttatcagtatccacgacaaagggcatattgcttcagttcttaacgcatggccagaagatgttgtcaaggctattgtggtgactgatggagagcgaatcctcggcttgggcgaccttggttgtaacgggatgggcatccctgtgggtaaactggccctgtacacagcgtgcggaggggtgaatccacaacagtgtctacccatcactttggacgtcggcacagaaaatgaggagttacttaaagatcccttgtatattgggctgcggcacaggcgagtgagaggccctgaatatgatgcgtttttggatgaattcatggaggcagcgtcttccaaatatggcatgaattgccttattcagtttgaagattttgccaatctgaatgcatttcgtctcctgaacaagtatcgaaacaagtattgcacatttaacgatgatattcaaggaacagcgtctgtggcagttgccggccttcttgctgctcttcggataaccaagaacaagctctctgatcagacagtgctgttccagggagccggcgaggctgccttggggattgctcatctgattgttatggccatggagaaggaaggtttatcaaaggagaaagctagacaaaagatatggttggttgactcaaaaggattaatagttaaggggcgtgcttctctcacagaagagaaagaggtgtttgcccatgaacatgaagaaatgaagaacctagaagccattgttcagaagataaaaccaaccgctctcataggagttgctgcaattggtggtgctttcacagaacaaattctcaaggatatggctgccttcaacgagcggcccatcatctttgctttgagtaatccgaccagcaaagctgagtgttctgcagaggagtgctataaagtgaccaagggccgtgcgatctttgccagcggcagtccttttgatccagtcactcttccagatggacggactctgtttcctggccaaggcaacaactcctatgtgttccctggagttgctcttggggtagtggcctgtggactgagacacatcaatgattcggtcttcctcaccacggctgaggtcatatcccagcaagtgtcagataaacacctagaagaaggccggctctatcctcctttgaataccatccgagatgtttccttgaaaatcgcagtaaagattgtgcaagatgcatacaaagaaaagatggccactgtttatcctgaaccccaaaacaaagaagaatttgtctcctcccagatgtacagcactaattatgaccagatcctacctgattgttattcgtggcctgaagaagttccagaaaatacagaccaaagtcaatcagtaacacaacagctagaatttttaactttattaataagatcttga

SEQ ID NO: 835 - DNA, 404 bp, Rattus norvegicus
ggaattccggggctcaggctactctgaagcgacccagcgttctgcctgacacgccccgctcgagacaccatggtggcgtactggcgacaggctggactcagctacatccggttctcccagatctgtgcaaaagcagtgagggatgccctgaagactgagttcaaagcgaacgctgagaagacttcgggcaccagcataaaaacagtgaaaataaagaaggagtagccgagcctgactgaagcctgacgtgcggagtcttccaggtgaagcatgtgggcacctgttccggcagatggaggtcagccgtacctcctggagacagacacccatcttgttgatgaattgactatgccaataaattaacacggttcactctcggcaaaaaaaaaaaaaaaaaaaaaaaa

SEQ ID NO: 836 - DNA, 519 bp, Rattus norvegicus
ggtggagcaggtcgcaggaatctcttcgcttcaatcatggcctgtggtctggtcgccagcaacctgaatctcaaacctggggaatgtctcaaagttcggggagagctggccccggacgccaagagctttgtgttgaacctggggaaagacagcaacaacctgtgcctacacttcaacccccgcttcaacgcccacggagatgccaacaccattgtgtgtaacagcaaggacgatgggacctggggaacagaacaacgggagactgccttccctttccagcctgggagcatcacggaggtgtgcatcacctttgaccaggctgacctgaccatcaagctgccagacgggcatgaattcaaattccccaaccgcctcaacatggaggccatcaactacatggcggcggatggtgacttcaagattaagtgtgtggcctttgagtgaagccagccagccccagcccgtagcccccaataaaggcagctgcctctgctccctgtaacccaaaaaaaaaaaaaa

SEQ ID NO: 837 - DNA, 557 bp, Rattus norvegicus
ctttgtttgcaaaatgttaaggagactatccaaggggggaaaaaatgaattcaaagggtttgtgtcacaaagtaaaccagtcctccacaggcaaattcatttgtttttgggcttcgaggccatgtagagggcgatcaggcagtagatggtccctcccactgtgagagccatggtggtccggtaaagcatttggtccggaaggcctcgtttcaggtggatgggcacaccgtcagccttctggaagaatctctgtagctctggaactttattcttcccagcatagtcatatgctgtcacactggaggtcagtttggtcggtgtggcaaatatgataggcggtgcttctctggaaaccggcttaaaacccttttttggtttctgccatggtggctcacaacaggtccatgtatcctgagctggcctttaactcacttgcagcccaggctggtcttgaactcctgatcctgttacatctgcttcctgcggagtataggcttccgaagcccaagcactaaccaacttctgcgtgaaactgttaaactggagtacatgttggc

SEQ ID NO: 838 - DNA, 644 bp, Rattus norvegicus
attatgaatgacattttattcagtcattttctttacaactgaaactctgggaattcaaagttaacatccttgcctgtgagcttcttgtacacgccagaaaaagtttcgaccttatgctccacgttgttctgctgtgctttgtctaaatgaacttttatgagccggctgccatccagtttcacacggatcctcttgcccacaatttcacttgggaagaccaaatcctcaaggatggcgtcgtgcactgctgtcagggtgcggcttctggggcgcttttgcttatttttcgtacggctttttcgggttggcttgggcagaatcctcctctgagcaatgaagactacgtgtttcccactgaactttttctccaattcacgaactagccggacttggattttctggaaagatttcagctgaggaactggtacaaaaattatgatggcttttcgaccaccaccgacttcgatttcctttgccgcggtgatgttgagttcccgcagctgcgccttcagatccgagttcatctccagctcgagcagcgcctgagagatgccagactcgaactcgtccggcttctcgccattgggcttcacaatcttggcgctcgagctgaacatggcttcgtccttacggagcctcgtgcc

SEQ ID NO: 839 - DNA, 4257 bp, Rattus norvegicus
gacaggcagtcctgcagagcgcatcagggtgcatctctagacagttggggatcgccaggtcggagtgtgcaccgggtctgctaagttttgccttcacccagagtcttggatcccgcctggatggagtcccttctgggtttccattggctcctgtgagtgcttgggtgtctggagattgttttttggcgaaggggaacaacttttgaagttcgcccaggagaccgcgttccaaccctagtgcctaggcagccggacccgcgggggcgcgaccgcggcgggagtcaccatgggcagcaaaggcgcctaccggtaccattggcagagccacaatgtcaagcacagtggtgtggacgacatggtactactctccaagatcacagagagctccatcgtagagaacctgaagaagagatacatggacgactatatttttacatatatagggtctgtcttaatctctgtcaaccctttcaagcaaatgccatattttggagaaaaagagattgaaatgtaccaaggagcggcccagtatgagaacccacctcatatctatgcccttgcagacagtatgtacagaaacatgatcatcgacagagagaaccagtgtgtcatcatcagtggtgaaagtggtgctggaaagacagtagctgccaagtacatcatgagctacgtctccagagtgtccggaggaggccccaaggtccagcatgtcaaggacatcatccttcagtccaacccactcctggaggccttcgggaatgccaagacagtccgcaacaacaactccagccgatttggaaaatactttgaaatccagttcagtccaggtggggaaccagatggtggcaagatctccaacttccttctggaaaagtccagagtggtgatgaggaacccgggagaacggagcttccacatattctaccagctcatcgagggcgcctctccagagcagaagcaaagccttggtatcaccagcatggactactattattacctgagcctctcagggtcatacaaggttgatgacattgatgacaagcgggatttccaggaaaccctgcacgccatgaatgtgattgggatcttctcagaggagcagactctcgtgctgcagattgtggctggaattctccacttgggaaacatcaacttcaaggaagtgggcaactatgcggccgtggagagcgaagaatttttggcttttcctgcgtatctgctgggtataaaccaagaccggttaaaagagaagctgacgagccggcagatggacagtaagtggggaggaaagtcagagtccatccatgtgaccctcaatgtggagcaggcctgctacaccagggatgccctcgccaaggccctgcacgcgcgagtctttgatttcttggtggattccatcaataaagctatggagaaggaccacgaggagtacaacattggtgtcctggacatctatggctttgaaatatttcagaaaaatggcttcgagcagttctgcatcaatttcgttaatgaaaaattacagcagatttttatcgagctgacgctaaaggccgagcaggaagaatacgttcaggaggggataagatggacacccattgaatatttcaataataaaattgtgtgtgacctcatagagagcaaagtcaaccctcctggaattatgagcatcctggatgacgtgtgtgccaccatgcatgctgtgggtgagggtgctgaccagacactgctacagaagctccagatgcagatcgggagccatgagcactttaacagctggaaccaaggtttcattattcaccactatgctgggaaggtttcctatgacatggatggcttctgtgaaaggaaccgggatgtgctattcatggacctgattgagctcatgcagagcagtgagctgccttttataaagtctttatttcctgaaaacctgcaagccgacaagaaagggcgcccaacgactgcaggaagcaaaataaagaaacaagccaatgacctcgtgagcaccctgatgaaatgtacaccccactacattcgctgcataaaaccgaacgaaaccaagaagcccaaagactgggaggagagcagagtgaagcatcaagtggagtacctgggtctcaaggaaaacatccgagtgagaagggctggttatgcttatcggcgtgtcttccagaaatttctacagaggtatgccattctgaccaaagctacctggcctgtgtggagaggagatgagaaacaaggtgtcctccatctgctacagtctgtcaacatggacagcgaccagttccagctcgggaggagtaaagtgttcatcaaagccccggagtctctatttcttctggaagagatgagagagagaaagtatgatgggtacgcacgcgtgatacagaaaacatggaggaagtttgtggcccgcaagaagtatgtccagatgagagaagacgcctcagacctgttgttgaacaagaaggagaggaggagaaacagcatcaaccgaaacttcatcggggactacatcgggatggaggagcacccggagctccagcagtttgtgggcaagagggagaagattgactttgctgacatagtcaccaagtatgacaggaggttcaagggtgtcaagcgagacctgctgctaaccccaaagtgcttgtacttaattggaagggagaaggtgaagcaaggcccggacaaaggtcttgtgaaggaagtcctgaagcggaagatcgaggtggaaaggatcctgtccgtgtccctcagtaccatgcaggatgacatcttcattctccatgagcaagagtatgacagtttgcttgagtccgtctttaaaacagagttcctgagccttttaacaaagcgatatgaggaaaaaacccagaagcaactacctctgaaattcagcaatacccttgaactgaagttgaaaaaggagaactggggtccctggagtgctgggggctcccggcaagtgcagttctaccaaggcttcggtgacctggccatcctcaagcccagcaacaaagtgctgcaggtcagcattggacctgggctgcccaagaacgcccgtcccaccagaagaaacactgtctcaagcagagggtattctggtggaactaacaacaattacccgatgagagccgcccctgctcccccaggatgccatcgaaatggcctcaccagaaaccagtttgtgcatcctccccgtgcctctggaaaccagaggtccaatcagaaaagcctatacacctctatggcccgcccacccttgccaaggcaacagtccacaggctcagaccgattgtctcagacaccggagagcctggatttcctcaaggtcccggaccagggtgctgctggagtccgaagacaaacgaccagccggcctcccccagcaggcggcagaccaaagcctcagcccaagcctaagcctcaggtgccgcagtgcaaggctctgtatgcctacgatgctcaggacacagacgaactcagcttcaatgccaatgacgtcatcgatattattaaggaagatccttctggctggtggacgggtagactacgaggcaagcagggcctgtttcctaacaactatgtcaccaagatctgaggcgcccagaaattgtcatgcaggcagaggagctccagacgtggactggggaggggactttttggggactccccttctgatccacaatgagcaactgctactccaaggtctgaagctattctggtaccttccccatggaagacgcagaaaagcttgggatgggaacaaggagtttcactccgtaaatgatcctaaaaggtagtctagttcccaggagcgccaaaacaaccacccactaagatttatttattgtatttaaatctggtgaaagcagcaggggctgctgggtgtctatcccgcagcctccagcgcactcaccaagcccaggggacagcaggtggtgactatgacaagtgcctttagttgaagagcacgtttcattcattcctctcttccatacctgatacattcctttctgctaaccctccttcagggaggacccaccctctgcaggctggacttggtgtgaacaggcactcacctgtcaatgccaagggcaggccgtccttccaagcccatgggagccagggccactaagactgctggtggggaggaagttgggtgctgggctgactgatggtcttgctttcccttggtctttgcttgtaatgtggctggcccatgttggttttatgtttaatgttgtg

SEQ ID NO: 840 - DNA, 4566 bp, Rattus norvegicus
ccagcttgcgtccatggccaccgctgcgaccgaggagcctttccctttccatggtcttctaccaaagaaagagactggggcctcctccttcctgtgccgctacccggagtatgacggacgcggggtgctcatcgccgtcctggacacaggggttgatcccggggccccgggcatgcaggtcacgactgatgggaaaccaaaaatcattgatatcattgatacaacaggaagtggtgatgtgaatactgctacagaagtagaaccaaaagatggcgaaatcactggtctttctggaagagtgcttaagattcctgcaaactggacaaatccttcaggaaaatatcatattggcattaaaaatggttatgacttctatccaaaggctctcaaggaaaggatacagaaagaacggaaggaaaaaatctgggatccaattcacagagttgcgcttgcagaagcttgtagaaaacaagaagaatttgatattgccaataatggctcttcccaagccaataaactaatcaaggaagagttgcagagtcaagtggaattacttaattcttttgagaaaaagtatagtgatccaggccctgtgtatgactgcttggtgtggcatgatggtgagacctggagagcctgtgttgattcgaatgaaaatggggacttgggtaaatctactgtattgagaaactacaaagaggctcaagaatatggttcttttggcacagctgagatgctgaattactctgttaatatttatgatgatggaaacctgctctccattgtgaccagtggaggagctcatggaacccatgtagcgagtatagctgctgggcattttccagaagagcctgaacggaatggagttgctcctggtgctcaaattctatccattaagattggtgatacaaggctaagcaccatggaaacaggcacaggcctcatcagagctatgatagaagttataaatcataagtgtgatcttgtcaactacagttatggagaagcaactcattggccaaattctgggagaatttgtgaagtaattaatgaagcagtatggaaacataatacaatttatgtttcaagtgctggaaataatggtccatgcctttctacagtgggttgtccaggaggaactacttccagcgtgataggtgttggagcttatgtttctcctgatatgatggttgcagagtattcactgagagagaaactacctgcaaatcaatatacatggtcttctagaggcccaagtgctgatggggcccttggtgtgagcatcagtgcaccaggaggtgctattgcttctgtgcctaactggacattgagggggactcagctaatgaatgggacatcaatgtcttcccccaatgcctgtggtggcattgccctggtactttcagggctgaaagcaaataatgttgactatactgttcactcagtcagaagagctctagaaaacactgcaataaaagctgacaatatagaagtatttgcccaaggacatggaattattcaggttgacaaagcttatgactacctcattcagaatacatcatttgctaacagattaggttttacagttacagttggaaataaccgtggcatctacctccgagatcctgttcaggtggctgctccttcagatcatggtgttggcattgagcctgtatttccagagaacacagaaaactctgaaaaaatatccttccagcttcatttagctttaacttcaaattcatcttgggttcaatgtcccagccatttggaactcatgaatcaatgtcggcacataaacatacgtgtggaccccaggggcttaagagaagggttacattatacagaggtatgtgggtatgatatagcatcccccaatgcaggtcctttattcagagttccaatcactgcagttatagcagcaaaagtaaatgaatcatcacattatgatctagcctttacagatgtacattttaaacctggtcagattcgaagacattttgttgaggttcctgagggggcaacttgggctgaagttaccgtgtgttcgtgttcttctgaggtatcagcaaaatttgttcttcatgcagtacagcttgtgaagcagagagcatatcgaagtcatgaattttataagttttgttcccttccagaaaaaggaacactcattgaagcctttcctgttctgggtgggaaagcaattgaattttgtattgctcgttggtgggcaagtctcagtgatgtcaatattgattataccatatcattccatggcatagtgtgtactgcaccacagttaaacattcatgcatctgaaggaatcaatcgttttgatgtccagtcctctttaaaatatgaagatctggctccttgcataactttgaagagctgggtgcaaacactacgcccagtaaatgcaaaaaccagacctttaggatcaagagatgttttgccaaataatcgccagctttatgagatggtcctgacatacagctttcatcagcccaagagcggagaagtaacacctagttgtccactcctttgtgaattattatatgagtcagaatttgacagtcagttgtggattatttttgaccagaacaaaagacagatgggctcaggcgatgcctatccacatcagtattctttgaaattggagaaaggagattatacgattcgattacagattcgtcatgagcaaatcagtgatttggatcgtctcaaagatcttccgtttattgtttcgcataggttgtctaataccttgagcttagatattcatgaaaatcatagccttgcacttctaggaaagaagaaatcaagcagtttgacattaccacccaaatataatcagccattctttgttacttccttacctgatgataaaatacctaagggggcaggacccggatgctaccttgcaggctccttgacattgtcaaagactgagcttggaaagaaagctgatgtgatccctgttcattactatctaatacctccaccaacaaagactaagaatggcagcaaagataaagaaaaggattcagaaaaagagaaagatttgaaagaagagtttactgaagctttacgagatcttaaaattcagtggatgaccaagctggattctactgacatttacaatgaattgaaagaaacatatcctgcttaccttcctttgtatgttgcacgtcttcatcaattagatgctgaaaaggagcggatgaaaagacttaatgaaattgttgatgctgccaatgctgttatttctcacatcgatcagaccgctctcgctgtttacattgccatgaagactgaccccaggcctgatgcagctactataaaaaatgatatggacaagcagaaatctaccctggtagatgccctctgcaggaaaggatgtgctctggcagaccaccttcttcatgcacagccccacgatggggcagcagctggagatgcagaagcaaaagaagaggaaggagaaagtaccttggaatctctatcagaaacctattgggaaactacaaagtggacagatctttttgacactaaggttttgacatttgcatacaagcatgcattagtaaataagatgtacgggagaggccttaagtttgcaaccaaactcgtagaagaaaaaccaacaaaagaaaactggaaaaattgtattcaactgatgaaattactcggatggacccattgtgcgtcttttactgaaaactggctccccatcatgtatcctcctgattattgtgtattctaaaatgggaaccaaaacgttaaatttcgaaagcagaaaattttatagtgaacaaatatatgaacaaatgtgtggcatttctagtctaactaatgcatgtcttcatccactatcgaatactgatcattaaaactctatgtatttatcagagaactcaatggtgtgtggcttcatacatgtaatgtagacagacctctgacatcatgctgctttcctgctgcctcccacacttggctagggagggcagagcctgcctgccagccccaacctgggtggatgcagctgctcactgcaggagaggttttcatctcttaatttttaactgtaaaacgtcatccagtttttattttataaatcaaaaaggttaaaacatgctaaatttttccaattatatagaggccttaaaaatgctacattgggtgtagctaaattatttatttgactaaaaattacgagaacataatttccagacttctaaaaataaattcaattaatgggtatggtggggaggtataaatacatggcaactgggaaaagaaacgtgttaatgtaatcttcactccggagtcacaacaagcaagttgtttttacagcatcctcaagtacacagcatcagaataagttaaaatttcatgtgttggtgccagacagttgaatctatctggttttgtaaagatatacacagtatgtttataacattgaaatcatgtaaaatacatgaataaatgtgcaaaacaacaggcacagcacaccatatgcactctgatacctgttttttataaataaaagtaaatattgaagctaaa

SEQ ID NO: 841 - DNA, 281 bp, Rattus norvegicus
acgccggacgccgcccacgtctgaacttcgggagacggagggccccggggagcggggccctgcgagcagactcccagccgcgcgacgcgatcccccccgcggcggcgaaaccgcaagggggggcggcgattgatcgtcaagcgacgctcagacaggcgtagccccgggaggaacccggggccgcaagtgcgttcgaagtgtcgatgatcaatgtgtcctgcaattcacattaattctcgcagctagctgcgttcttcatcgacgcacgagcccctcgtgcc

SEQ ID NO: 842 - DNA, 5519 bp, Rattus norvegicus
ccccacaccaaggctccatcgggatggcctgtgcagcctgctccacacgagctatgtgcagctctgggtacatctgtctgcagtactccagcaccgctgcgggtccagaagacagcgtcgtgaacgctgtgggtctggttcccagcggccggtgcgcaggtctcggtgaagggtgagacgcccacatagtccagccacttgagccgaccccggagcctcggccgcgaacccaagatggcggtgtgtggacgtgtacggaggatgttccgcttgtcggcggcgttgcagctgctgctgctagtggcagcaggggtccagaatagccacggtcagggccagggtctgggggtcaactttgggcccttcgcagggcaagctggaggcggcaacccggtcgggcagcagccacctcagctgcctcagttatcgcagcagcagcagcagcagcagccgccgcctcagcagcagcagcctttcccggcgggcgggctcccggcccggcggggcggagcagggcccggtgggactggcggaggctggaagctggcggaggaagagtcctgcagagaggacgtgacccgtgtgtgccccaaacacacctggagcaacaacctggcggtgctcgagtgcctgcaggacgtgagggagcctgagaatgagatttcttcagactgcaatcatttgttgtggaattacaagctgaacctgactactgatcccaaatttgaatctgtggccagggaagtttgcaagtcaactatttcagagattaaagagtgtgctgaagaaccagttggaaaaggttacatggtttcctgcttggtggatcaccgaggcaacatcactgaataccagtgtcatcaatacattaccaaaatgacagccatcatttttagtgattatcgtttgatctgtggcttcatggatgactgcaaaaatgacatcaacctcttgaaatgtggcagcattcgccttggggaaaaggatgcacattcacaaggtgaggtggtatcatgtttggaaaaaggcctggtgaaagaggcagaagagaaagagcccaagattcaagtctcagaactctgcaagaaagccattcttagggtggctgagctgtcctcggatgactttcatttagaccggcatttgtattttgcttgcagagatgatcgggagcgcttttgtgagaatacacaagctggtgaaggaagagtgtataaatgcctttttaaccataaatttgaagaatccatgagtgaaaagtgtagagaagcactaactacacggcagaagctcattgcccaggattataaagtcagctattcattggccaagtcctgtaagagtgacttgaaaaaataccgatgtaatgtggaaaaccttcctcgctcccgagaggccaggctctcctaccttctgatgtgcctggagtcagccgtgcacagagggcgacaagtgagcagtgagtgccaaggtgagatgctggattaccgacgcatgctgatggaagacttctctctgagccccgagatcatcctgagctgtcgaggggagatcgaacaccactgttctggattacatcggaaaggacgcaccctccactgtctgatgaaagtagtccggggtgaaaaggggagccttggaatgaactgccagcaggcgcttcagacactgattcaggagactgaccctggcgcagactaccgcattgatcgagctttgaatgaagcttgtgaatctgtaatacagacagcctgcaaacatatacgatccggagacccaatgattctttcatgtctgatggaacatttatacacagagaaaatggtggaagactgtgaacaccgtctcttagagctacagtattttatctctcgggattggaagttggaccctgttttataccggaaatgccagggagatgcttcccgtctttgccacacccatggttggaatgagaccagtgaacttatgcctcccggagctgtgttttcttgcctgtatagacatgcctaccgcacagaagagcaaggacggaggctctcacgagaatgccgagctgaagtccagaggatcctacaccagcgtgccatggatgttaagctggatcctgccctccaggacaagtgcctgatagatctaggaaagtggtgcagtgagaagacagagactggtcaggagcttgagtgccttcaggaccatctggatgacttagctgtggaatgcagagacatagtgggcaacctcacggagttagagtctgaggacatacaaatagaagctttgctgatgagagcctgtgagcctataattcacaacttttgccacgatgtggcagacaaccagattgactctggggacctaatggagtgtctgatccagaacaagcaccagaaggacatgaatgagaagtgcgccattggcgtcactcacttccagctggtccaaatgaaggattttcgattctcttacaagttcaaaatggcctgcaaggaggatgtgttaaaactttgccccaacataaaaaagaaggtggatgtggtgatctgcctgagcaccaccgtgcgcaacgacactctgcaggaggccaaggagcaccgggtgtctctcaagtgccgcaagcagctccgtgtggaggagctggagatgacagaggacatccgtttggaaccagatctgtatgaagcctgcaagagtgacatcaagaactactgttctacagtgcaatatggaaatgctcagattattgaatgtctaaaagaaaacaagaagcaactgagtacccgttgtcaccagagagtatttaagctgcaggagacagagatgatggacccagaactagactatacactcatgagagtctgcaagcagatgattaagcggttctgtccagaagcagattctaaaactatgttacagtgtttgaaacaaaacaagaacagtgaattgatggaccccaagtgcaaacagatgatcaccaagcgtcagatcacccagaacacagattaccgtttaaaccccgtgctaaggaaggcctgtaaagctgacattcctaaattctgtcatggcatcctgaccaaggccaaggatgattcagagctagaaggccaagttatctcatgcctcaagctgagatacgctgaccagcgcctgtcttcagactgtgaggatcagatccgtatcatcacccaagagtctgcgctagattaccgcctagaccctcagctccagctgcactgctcagacgagattgctaatttatgtgctgaagaagcagcagcccaggaacagacaggccaagtggaagagtgcctaaaggtcaacctgctcaagatcaggacagagctgtgtaaaaaggaagtgttgaacatgttgaaggaaagcaaagcagacatctttgtggatccagttcttcacacagcgtgtgccttggacattaaacaccactgtgcagccatcacccccggccgtgggcgtcagatgtcctgcctgatggaggccttggaagacaagcgcgtgaggttgcagcccgagtgcaaaaagcgcctgaatgaccgaatcgagatgtggagttatgcagccaaggtggccccagcggacggcttctctgatcttgccatgcaagtgatgacatccccatcaaagaattacatcctgtctgtgatcagcgggagcatctgcatattgttcctgattggcctgatgtgtggacggatcactaagagggtgacacgagagctgaaggacaggtagagctgcctgaccaccagaggagcctcctgccaggcccgcccgcctgtacagccgtcctgtgtagtgtaccctctcacttcgcccttctaacggtggcaccagcacccacagtagagcagcatcaggtgcccactgcatcttcccatccagacttggccatgtcctcggtgtcctcctcctcccagctgcccttgcagcggcggcagctggctgctttggtggtagcttttgttggcgaaggtttacctgcctgtagacaattctgtcacaccaacagaactgctggtacttcagaaccgactcacctgacctgcaactcaaattttttttttaaaaacagaaaacaaaacaaaagacaaaaaaaattttaaaaaggaaaaagtgtatatagtagaacatctccttcagtcttgactcgagcagtaggattctttctttcacgtaaatgcagcaggtgtcagcagaacttggaggagacgcgcatatccggtgcctgatcatgaaatgtctatttcctctcctagaagcaacttggggccacagcaagtagtggggacggacactaagcagccgctctagggcctgttggcttctactgcattgtgatgccttctgccctctaccccagacaagccactgctccccacaatcccctgacaacaggcatttctgtgatcgccccagtgcagacatgagccttcttcctgggtctggcaatggactagggagggagcaaagtctgaagcagcccgagtgcacaaccagcagggtcccagccaccatcttcctccaggatggacggagctgcctcgtctttatgaaccctgccaagtgtggggctgccctgggggttctgtacatcggcaagaagtagttacagtgctagggtgtggggcttctgaggtgagggtgagggtggcagggcaggaagggacaggtgtgggactcacttcacttagcttcctgagcaacagtacaggcaggaagtgatggcttctgaagatttggcgtggtctcgggtgtgtgactggcattgaagcctgactttctatccgtgccaggcagacttccctgacaagctcctttgtgcctctaaatgaagggatgtggaaaggggttgcattaaaagatggaggattttcttcgttctttttttttcccctttctgttcatttgctgcgtgtacccactctaataggcactggataaatgttctattttggtgacttgacaaccttccataatctgagagagcagtgtcccagccatcttccctcactcctccagtgtgaagatggtgacagtgctggggcctaagagcgaggagcccaggcactgcagttccccttcggcgagtttgggccatggtgtcacagtggctgtacagagggtggcatgtacagtaggagatatatttatataatatatattttattaacctgttagatgtccacagagtattataaatcatgtgcctaaaactgtccacacagacccaggccctctgcggtgccctccctgctcctgccttccatgtgcaccagagccatgcgcgtcttcctgaggtgttcgctgcaggctgtgtcagttgctccaagttactctgtctgacctgactacattcataggaatactgtggttttcttctctgctgccctttctggtggcagtgagttccagggctagcagtttgtcccctgcttgggtaatggaagtcaccatggggaactgcttgctaagctacctggcccctaagtcctgcggaattc

SEQ ID NO: 843 - DNA, 1386 bp, Rattus norvegicus
aattccgcggcgacctccggggatccgagtttgcagactacgtgtgtgcgcagctagccacctcaggtgtttgaaccatgacccctttactcctcctggctgtcctctgcttgggaacagccttagccactccaaaatttgatcaaacgtttaatgcacagtggcaccagtggaagtccacacacagaagactgtatggcacgaatgaggaagagtggaggagagcagtgtgggagaagaacatgaggatgatccagctacacaatggggagtacagcaacgggaagcacggctttaccatggagatgaacgccttcggtgacatgaccaatgaggaattcaggcagatagtgaatggctatcgccaccagaagcacaagaagggaaggttatttcaggaacctctgatgctgcagatccccaagactgtggactggagagaaaagggttgtgtgactcctgtgaagaatcagggccagtgtggttcttgctgggcttttagcgcatcgggttgcctagaaggacagatgttccttaagactggcaaactgatctcactgagtgaacagaaccttgtggactgttctcacgatcaaggcaatcagggctgtaatggaggcctgatggattttgctttccagtacattaaggaaaatggaggtctggactcagaggagtcttatccctatgaagcaaaggatggatcttgtaaatacagagctgagtatgctgtggctaacgacacagggtttgtggatatccctcagcaagagaaagccctcatgaagcctgtagcgacggtggggcctatttctgttgccatggatgcaagccatccgtctctccagttctatagttcaggtatctactatgaacccaactgtagcagcaaggacctcgaccatggggttctggtggttggctatggttatgaaggaacagattcaaataaggataaatactggcttgtcaaaaacagctggggtaaagaatggggtatggatggctacatcaaaatagccaaagaccggaacaaccactgcggacttgccaccgcagccagctatcctatcgtgaattgatggacagcgataataaggactgacggacactacatccgaaggagttcatcttaaaactgaccaaacccgtctctgagtgagaccatggtacttgaatcgttcaggatccaagtcacgatttaaattctgttgacatttttacatgggttaaatgttaccactacttaaaactcctgttataaacagctttataatattggacacttaatgcttaattctgattctggaatatttgttttataaaagttgtataaaactttctttaccttttaaaaataaattttagctcagtgcaaaaaaaaaa

SEQ ID NO: 844 - DNA, 4400 bp, Rattus norvegicus
ccgagtctcctgcctcccgccccccacccctccagcgcctgctcctcctccgctccccatacacagacacgctcacacccgctccttcacttgcacacacagacacacgcgcgctcacacgctccgcacacacactccactctctcccgcgcgctcacacccctctctctcggcgccctcgccggtgtcgcgccgcgccgcgccgcagccggacgcccctccagggctcactttgcaacgctgacagagcgggcagtggccgtggaggtgggaaacgtggcgacatcctagcccctggtcgcagccggagactggacgctgcggaacctctcggcggcgctctcccatgagttgggatcgcagcatccccagccagccgctgctcaccgcctctgggagccgctgggtttgtgcaccgcagcccttccgggacagcagctgtgactctcccccaatccagatttcggggtcgctctctagaaactcgctctaaagacggaacctccacagaacccaaagcccactgcgggagagcgcagcccgacaagcccgggcgctgagcctggaccctcaacagagcgggccagcacagcggcggcggctgcttcgcctatcccgacgtccccgcctcctacactctcagcctccgctggagagacccccagccccaccattcagcgcgcaagataccctccagatatgccctgcgtgcaagcccaatatagcccttcgcctccggggtccacttatgccacgcagacttatggctcggaatacaccacagaaatcatgaaccccgactatgccaagctgaccatggacctcggtagcacggggatcatggccacggccacgacgtccctgcccagcttcagtaccttcatggagggctaccccagcagctgcgaactcaagccctcctgcctgtaccaaatgccgccttctgggcctcggcctttgatcaagatggaagagggtcgcgagcatggctaccaccaccaccaccaccatcaccatcatcatcaccaccaccaccagcagcagcagccgtccattcctcctccctctggccccgaggacgaggtactgcccagcacctccatgtacttcaagcagtctccgccgtctacgccgaccactccaggcttccccccgcaggcgggggcgctgtgggacgacgagctgccctctgcgcctggctgcatcgctccgggaccgctgctggacccgcagatgaaggcagtgcccccaatggccgctgctgcgcgcttcccgatcttcttcaagccctcaccgccacaccctcccgcgcccagcccagccggcggccaccacctgggctatgaccccacggccgcagctgcgctcagtctacccctgggagccgcggccgccgcgggcagccaagctgctgcgctcgagggccatccgtacgggctcccgctggccaagaggacggccacgttgaccttccctccgctgggcctcacagcgtcccctaccgcgtccagcctgctgggagagagccccagcctaccatcgccacccaataggagctcatcatccggcgagggcacgtgtgctgtgtgcggggacaatgctgcctgccagcactacggagtccgcacctgcgagggctgcaagggcttcttcaagagaacggtgcagaaaaacgcaaaatatgtttgcttggcaaataaaaactgcccggtagacaagagacgtcgaaatcgatgtcagtactgcaggtttcagaagtgtctcagtgtcgggatggtgaaggaagttgtgcgtacagatagtctgaaagggaggagaggtcgtctgccttccaaaccaaagagcccactacaacaggagccctcgcagccctccccaccatctcctccgatctgtatgatgaacgcccttgtccgagctttaacagacgcaacgcccagagaccttgattactccagatactgtcccaccgaccaggccactgcgggcacagacgctgagcacgtgcagcagttctacaaccttctgacggcctccatcgacgtgtccagaagctgggcagaaaagatccccggattcactgatctccccaaagaagatcagacgttacttatagaatcagcctttttggagctgttcgttcttagactttctatcaggtcaaacactgctgaagataagtttgtgttctgcaatggacttgtcctgcaccgacttcagtgccttcgcggatttggggagtggctcgactccattaaagacttttctttaaatttgcagagcctgaaccttgatatccaagccttagcctgcctgtcagcactgagtatgatcacagagcgacatgggttaaaagaaccaaagagagtggaggagctatgcaacaagatcacaagcagcttaaaggaccaccagaggaagggacaggctctggagccctcagagcccaaggtccttcgcgcactggtggaactgaggaagatctgcacccagggcctccagcgtatcttctacctgaagctggaggacttggtgtccccaccttctgtcatcgacaagctcttccttgataccctgcctttctgagcaggggaagcctgagcagagagctacttgctctgctggcactggtcattaagtgagcaaaaggatgggtttgaacacctgcccctctatccttcctccaggggaaaaagcagctcccatagaaagcaaagacttttttttttcctggcacctttccttacaacctaaagccagaaaccttgcagagtattgtgttggggttgtgttttatatttaggctttggtgggtgggctgggagggggtaaaatagttcatgaggcttttctaagaaattgctgacgaagcacttttggatgatgctatcccagcagtggggtggggagaaaggataatataactgttttaaaaactctttccgggggaatatgactatggttgctttgtatttaaaaataagaacagccaagggctgttttaccagggtagggctgtgtcttaagactgatccctttagtatgtacttcccggatcgaggcacataagtggtgcaaatgaggcggggaaattcttcatttcttcatttctttcttcttcttaaaataaaatggcaaaaaaaaaaagatggaagattatctacaaatcagacttagcaaaatgataatggctattcgcttccacatacaagtgcaattttttagagtgctgtcttactaagtcttgtttgtgaactctccctcattttatatgaaaataagaaggaggcagtcatgttatcaaacggcgtgctcattttcctagctcacccttggtccacctgccctgtagaacccttcggaggtatggcccttctaagactttcaggccactcttgatggaattcgacacccctcccctcaacccatgactatccagatgtcctgaatggggatcaggttataaaatggattgcatatgactgtgttcgctgtgtgtttgtcaacctggacagagttctctaaaccttctttagttgtagcaagttcctgattcctccattcagaagcccaaggagcattgggtgactcgatcaagggttaaccctaggagaacatgcaaataagtaggaactgggtcagacagggtaagcaccagagatgataaggatttatatataaatatatataaaattaatttttgttattggttatagacaattttggaaagcaagagaatcatctcttttttttttttaaagaggaaaagatagtattgatgtattagcaaagattagtggggtacggttcaacattccgtgtttgtgcccccttttctatgtttctactgttgatggcatattattatgaaatgattcgttgcatagtgtccttatttgtatgaacatttgtatgcacgttctattgtaatcgctttgcctgtatttattgcaagaccaccagctcctggaggctgagttacagaataatcaaatggggtgttcgtggtgacttggatacaccggttagaaattaaataagcatatatatatatataaaaacatagcaggttacatatatatttataatgtgtctttttattaaccatttgtacaataaatgtcacttcccacgcagttattttatcctttgtttgcagtgacctttaaggcagcactgtttagcactttgatatgaaattttttgcttatttttttgctaaattcaaataacgtttgaagatttttaggtctaaaagtctttatattatatacactgtatcaagtcaagatacctttggccgttttgctaagactcaaactttgaatgtcaaaccaatgtcacggtagcttctgttagcttttaatcatttttgctttagtctttttttttaaaaaaaa

SEQ ID NO: 845 - DNA, 546 bp, Rattus norvegicus
tttagaggcactatttctagtacaatgggtatgaagctgtgatttgagccgcaaatttcagagcattggccatagaatagacctggtcggtttgatgtgactgtagcttggtttaggcggccggggattgcgtcggtttttaaccctagtgaagggatggctcatgagtgcaggacgtcttcggatgagattagtatacgaattggaagttctattggtaagactacccgattatcaacttattatgtgactgaggatgactttgaacttctaatcctcctgccgcctttctgctgaattctgggaccacgggtctacgctaccacacctggctttgtgtattgttagcagtcagatccagggccttagacatgctaaaaggactttccctctgagctattctcagcctgaggcttttctcacatgttcgtggaacaagccgtgttctcggaatgatgcgtgcatttttaggagcgagctagggtggcagggcatgggccacaaagtcaaaaatttattaaaagaagtttgttgacctctggtcta

SEQ ID NO: 846 - DNA, 625 bp, Rattus norvegicus
  misc_feature (1)..(625): n = a or c or g or t
tcttgttctctgaggtcactgtggtgtcaatagcagcactagaggggttagcaacacctgcaccaaaactgaagcctgcagatgaagactgaggcagctcctctttcttttcctgctgcccgagagtagataccccaaactgaaatggagctgaagacgctggattgcttaagccagaagaaggtccaaactgaaaattatcattcttgctgtcgttttttatttcttcaggtttggaatcaggtaatactccaaatttaaaatctccagttggtttaggaaatttaaagtttgtattcatggtgtttgtagacccagagtcagatgaagtgcctaatttgaatcctccctgatctccaaatttaaaatttccagtgcttgtaaaagtttgagaaagcccagaagatgatgatggaataccaaatttgaaggctgagggtgctggatttaaagatgaagatgtcccaaagcctttaaactcagactttgtgcctggctttgcactttcacaagctatgcacttggtagagtccgctttattttgcactaggcatacttcacagtcccagcttccctctggttttttaaacttgtccaatcctaaacagcctncagaaggcagaga

SEQ ID NO: 847 - DNA, 2307 bp, Rattus norvegicus
gccgccgcctcacctctgctgccagtagcctcgccgtcggggagccctagcgcagcgtccgccctcagcatgatggacttggaattgccaccgccaggactacagtcccagcaggacatggatttgattgacatcctttggaggcaagacatagatcttggggtaagtcgagaagtgtttgactttagtcagcgacagaaggattatgagctggaaaaacagaaaaaactcgaaaaggagagacaagagcaactccagaaggaacaggagaaggcctttttcgctcagttacaactggatgaagagaccggagaattcctcccaattcagccagcccagcacatccagacagacaccagtggatctgtcagctactcccaggttgcccacattcccaaacaagatgccttgtactttgaagactgtatgcagcttttggcagagacattcccatttgtagatgaccatgagtcgcttgccctggatattcccagccacgttgagagctcagtcttcaccacccctgatcaggctcagtcactcgatagctctctggagacggccatgactgatttaagcagcatacagcaggacatggagcaagtttggcaggagctattttccattcccgagttacagtgtcttaatacggaaaacaagcagcaggctgagactaccactgtccccagcccagaggccacactgacagagatggacagcaattaccatttttactcatcgatcccctcactggaaaaagaagtggacagctgtagtccacatttccttcatggttttgaggattcttttagcagcatcctctccacggatgatgccagccagctgaactccttagactcaaatcccaccttgaacacagatttcggtgatgaattttactctgctttcctagcagagcccagtggcggtggcagcatgccttcctctgctgccattagtcagtcgctctctgaacttctgggcgggcccattgagggctgtgatctgtccctgtgtaaagctttcaaccagaagcacactgaaggcacggtggagttcaatgactctgactccggcatttcactgaacacaagtcccagccgagcatccccagagcactctgtggagtcttccatttacggagacccaccgcctgggttcagtgactcggaaatggaagagctagacagtgcccctggaagtgtcaaacagaatggacctaaagcacagccaacacattcttctggggatacagtacagcctctgtcgccagctcaagggcacagtgctgctgtgcacgaatcccagtgtgaaaatacaacaaaaaaagaagtacctgtgagtcctggtcatcaaaaagtcccattcacaaaagacaaacattcaagccgattagaggctcatctcacaagagatgagcttagggcaaaagctctccatattccattccctgttgaaaaaatcattaatctccctgttgatgacttcaatgaaatgatgtccaaggagcaattcaacgaagctcagcttgcattaattcgagatatacgcaggagagggaagaataaagttgccgctcagaactgtaggaaaaggaagctggaaaacattgtagagctggagcaagacttgggccacttaaaagacgagagagaaaaactactcagagaaaagggagaaaacgacagaaacctccatcttctgaaaagaaaactcagcactttgtatctggaagtcttcagcatgttacgtgatgaggatgggaaaccttactctcccagtgagtactctctgcagcagaccagagatggcaacgtgttccttgttcccaagagcaagaagccagatacaaagaaaaactaggttcgggaggatggagccttttctgagctagtgtttgttttgtacggctaaaacttcctactgtgatgtgaaatgcagaaacactttataagtaactatgcagaattatagccaaagctagtgtagaaataatatgaaactttacaaagcattaaagtctcaatgttgaatcagtttcattttaactctcaagttaatttcttgggcaccatttgggctagtttctgtgtaagtgtaaatactacagaacttatttatactgttctcatttgttacagtcatagacttatatgacatctggctaaaagcaaactattgaaaactaaccaaaccactatacttttttatatactgtatgaacaagaaatgacatttttatattaaattgtttagctctgataaaaattaaaaggagctagcactaataaaggaatatcatgactt

SEQ ID NO: 848 - DNA, 1685 bp, Rattus norvegicus
ggggcgcagagcggtttggtcgttcgttggaggagcttcgtcttgttctgctctgcgattgcggcgcttgttcgagcgcttacagcggcgcgtcggtcccagcaagggcctcagacttcagctttgggtgagagaagatggcccgaaccaagcagaccgctaggaagtccaccggagggaaagccccccgcaaacagctggccaccaaggcggcccggaaaagcgcgccctctactggcggggtgaagaaacctcatcgctacaggcccgggaccgtggctctaagagagatccgtcgttaccagaaatcgactgagctgctcatccggaagctacccttccagaggttggtgagggagatcgcccaggatttcaaaaccgacttgaggtttcaaagtgcagccatcggtgcccttcaggaggctagcgaggcatacctggtggggttgtttgaagataccaatctgtgtgccatccacgccaagagagtcaccatcatgcccaaagacatccagttggctcgccggatacggggggagagagcttaagttgaagcgatttttatggcattttgtagtaaattctgtaaaatactttggtttaatttgtgactttttttgtaagaaattgtttataatatgttgcatttgtacttaagtcattccatctttcactcaggatgaatggaaagagtgactgttcacagacctcagtgatgtgagcactgtggctcaggagtgacaagttgctaatatgcagaagggatgggtgatacttcttgcttctcatgatgcatgtttctgtatgttaatgacttgttgggtagctattaaggtactagaattgataaatgtgtacagggtccttttgcaataaaactggttatgacttgatccaagtgtttaaccatacatcactgtgatagaatgtgggctttttcaaaggttgaagatacaagttttagccacagtgtaacagtttcctttaaaaaaaaaaagtaaacctggcagctatagaatacactatgtgcatttataatagctattttatatattgtagtgttcaacatttttaaattaaatgttttacattcacaagtggtggggagtcttgtcattaaggtgtgtgtaatttagtccagttggtatttctgactagactgcatttgtttttaacaaagtagaagaatgctatgcgtattaaaccttgcataagtcctcattctaccacatgttcactaacccctgaccctctggctggtaacacaaaacactaacggggattttctttaagggctctagagtaaaacaacaagctattcacaccagcatcatctgttcctaatctagttagtgagcttttcattgtgtttggtcttacgcctagactgagtttggttttgtttttaatctttaagggggaaaactgtacaaggtttgcttttccttgtggagtttataaacatgggggtaagagtacagcttgagcttattggactctgccaatgaagatgggttaggttacacctggttactatcctggcaaaaaaatcccttttatagagatggccttcaagtggtttttaaaagtatcctattgaagtttttaggtcaattatgtatgttgactaaatttacaaataaacttgtttatccaaaaaaaaaaaaaaaaaaaaaaaaaaaaaa

SEQ ID NO: 849 - DNA, 1296 bp, Rattus norvegicus
ggggtcgagtccgcgtccacccgcgagtacaaccttcttgcagctcctccgtcgccggtccacacccgccaccagttcgccatggatgacgatatcgctgcgctcgtcgtcgacaacggctccggcatgtgcaaggccggcttcgcgggcgacgatgctccccgggccgtcttcccctccatcgtgggccgccctaggcaccagggtgtgatggtgggtatgggtcagaaggactcctacgtgggcgacgaggcccagagcaagagaggcatcctgaccctgaagtaccccattgaacacggcattgtcaccaactgggacgatatggagaagatttggcaccacactttctacaatgagctgcgtgtggcccctgaggagcaccctgtgctgctcaccgaggcccctctgaaccctaaggccaaccgtgaaaagatgacccagatcatgtttgagaccttcaacaccccagccatgtacgtagccatccaggctgtgttgtccctgtatgcctctggtcgtaccactggcattgtgatggactccggagacggggtcacccacactgtgcccatctatgagggttacgcgctccctcatgccatcctgcgtctggacctggctggccgggacctgacagactacctcatgaagatcctgaccgagcgtggctacagcttcaccaccacagctgagagggaaatcgtgcgtgacattaaagagaagctgtgctatgttgccctagacttcgagcaagagatggccactgccgcatcctcttcctccctggagaagagctatgagctgcctgacggtcaggtcatcactatcggcaatgagcggttccgatgccccgaggctctcttccagccttccttcctgggtatggaatcctgtggcatccatgaaactacattcaattccatcatgaagtgtgacgttgacatccgtaaagacctctatgccaacacagtgctgtctggtggcaccaccatgtacccaggcattgctgacaggatgcagaaggagattactgccctggctcctagcaccatgaagatcaagatcattgctcctcctgagcgcaagtactctgtgtggattggtggctctatcctggcctcactgtccaccttccagcagatgtggatcagcaagcaggagtacgatgagtccggcccctccatcgtgcaccgcaaatgcttctaggcggactgttactgagctgcgttttacaccctttctttgacaaaacctaacttgcgcaaaaaaaaaaaaaaaaaaaaaaaaaaaaaa

SEQ ID NO: 850 - DNA, 1600 bp, Rattus norvegicus
cgcctccagagtttccgcctccaaccagcgagtggagcctgccggagcagagccatctcgagcggagcccggagcctgaagcgagcggagccagcctgaactagcccagtcccgcgatggagcgcccacagctcgacagcatgtcccaggatttgtccgaggccttgaaggaggccaccaaggaggtgcacatccgtgcagagaattctgagttcatgaggaactttcagaagggtcaggtgtccagggaaggctttaagctggtgatggcctccttgtaccatatctatacggccctggaagaggagatagagcgaaacaagcagaacccagtctatgccccactctacttccctgaggagctgcaccgaagggctgccctagagcaggacatggccttctggtatgggccccactggcaggaggccatcccttacacaccagccacacagcactacgtaaagcgtctccacgaggtgggaggtactcatcctgagctgctggtggcccacgcatatacccgctacctgggtgacctctcagggggtcaggtcctgaagaagattgcgcagaaggccatggccttgccaagctctggggaaggcctggcttttttcaccttcccgagcatcgacaaccccaccaagttcaaacagctctatcgtgctcgcatgaacactctggagatgacccccgaggtcaagcacagggtgacagaagaggctaagaccgccttcctgctcaacattgagctgtttgaggagctgcaggcactgctgacagaggaacacaaagaccagagtccctcacagacagagtttcttcgccagaggcctgctagcctggttcaagatactacctctgcagagacgccccgaggaaaatcccagatcagcactagttcatcccagacaccgctcctgcgatgggtcctcacactcagtttcctgttggcgaccgtggcagtgggaatttatgccatgtaaatgcagtgttggcccccagaggctgtgaactctgtctcatgtagccttctctctgcaggggagaatcttgcctggctctcttttcttgggcctctaagaaagcttttggggttcctcgcccccttcctgtgtcttcctttgtctctctggaatggaaggagatgcctggcacatttccctcaccaaaagcacagccaggggcctgaacttggaaaccagcagccccaaatcctgcaacagagccccagaactgtggtcggtagaggcggctgttctgagcccagtgcccttggtagtcggcgtccatgttgactgaccatgactgctttcccccagcgtcatggccactttgatatcagtgtgcagagattttctgtcttgtgtttctgtcttgtttttgttatttccccagttctaccagtgtaatggtattttttgttgtatcgattgtttttttattctaaccaagtagggctgtcttttgaggggtgggtggtatttaataattgtaaccttggtctctaacttctgtgtgaaataataaatggcattatctaataaaaaaaaaaaaaaaaaaaaaaaaaaaaaaaaaaaaaaaaaaaaaaaaaaaaaaa

SEQ ID NO: 851 - DNA, 1552 bp, Rattus norvegicus
tcagttctgtaattaattaactaacgtggatcaaatgagaaggtgaaagttcacacaggagcactcctgtcgtcttggactgggtctccatcccaccatccagtgccctggtctacgaagagtccacagggaccttgtgaagaatcaacaaggcggggtccagaggagtcacgtgtgccttccactccgggtcgccctgtcaggatggggatgtcccagcccggggtcctcctcagcctcttattggtcctcctgcctcagacctggggagcggagccccgtctcccactgatgtatcatcttgcagctgtgtctgacttatcaacggggcttccctctttctgggccacgggctggctgggtgctcagcaatatctgacctacaacaacctgcggcaggaggctgacccctgtggggcctggatatgggaaaaccaggtgtcttggtattgggagaaggagaccacggatctgaaaagcaaagaacagctcttcttggaggccatcaggaccctggagaaccaaataaatgggaccttcacactgcagggcctgctgggctgtgaactggcccctgataattcttcattgcccacggctgtgtttgccctcaatggtgaggagttcatgcggttcaacccaagaacgggcaactggagtggggagtggccggagacagatatcgttggtaatctgtggatgaagcaacctgaggcggccaggaaggagagcgagttcctgctaacttcttgtcctgagcggctgctaggccacctggagaggggccgtcagaacctggagtggaaggagccgccatctatgcgcctgaaggcccgtcctggcaactctggctcctcagtactgacctgtgctgctttctccttctacccgccggagctcaagtttcgattcctgcgcaatgggctagcctcaggctctgggaattgcagcactggtcccaatggtgatggatctttccatgcatggtcattgctagaggtcaaacgtggagatgaacaccattaccaatgtcaagtggagcatgaggggctggcccagcctctcactgtggacctagattcgcccgccagatcttctgtgcctgtggtcggaatcattcttggtttattgctggtggtagtggccatcgcagggggtgtgctgctatggaacaggatgcgaagtgggctgccagccccatggctttctctcagtggtgatgactctggcgacctattgcctggtgggaacttgcccccggaggctgaacctcaaggtgtaaatgcctttccggccacttcctgatgccaacccaggccccatacccattgcagcctgtggggctgtgtgacctcctgaactgtctctgagcctcccgagggagccctgggctggatgtcctcctcgtggatcccttcttttgtggcctgcttcagtttcccctcttaatgtcaatggctatttccatctccacataaatttgggcccaaatctgtgtgtgcatcgttattctcaggtttcaggcagccggaataaattgaacaagtttgag

SEQ ID NO: 852 - DNA, 896 bp, Rattus norvegicus
atcttcagagacagaactcatcctgcttaggaactcctcagtgatggagctggcattgactcaacctcccttctttggcacactcctgatgctggtggtttcaaacttgctcttgtgggagaaagctgcatcaattcctgcatgtatggtggaagacggtggctgctgggaccctctcgaggaaacagtaaacagtgctatccagaaagctgaaaacctccgtaatcttgctcaccacttatatgtagaattctaccagaaccaattctcatctagacagtttgcagatcttaattcacaactgatgaggtgggatgagactgttgtcaaaactggaacttactgccattcaactcttgcaagaccccaaaataaaggaataaatattgaaattgaagtgtatttgcaaacgttgatcaattttgtgggttcatggatcagccctctcctccatttagtaattgaactgagtgccatggaaggtgtccctgaaactatcctctctaaagctaaggatctggaagagaacaacagacaacttctggatgaccttaggtggatactcaccaaggtctctcctacagcagagatgaaggaagaatttcccagctggggatatctttcattcttaaaatcaagtagcaaaaatcacaaatttttggcagtgtttaacctttccaactgtctagaagatgatacaaagttcactctatatcatctcagaatattgaaatgtctcataactgggaaagattgctaattgtacatttattatgtctgcttgggctatgctctaagacagttcattgttgagcagttgcttttaattgtatacatttcaaatgcatgtgtaggtacaatgtgtctctttcaaaaaataaaaagattctctttca

SEQ ID NO: 853 - DNA, 2125 bp, Rattus norvegicus
ctgagcacgcgggtgaaggcagggtctggagcggagcggagcgcgggtacgcgctctcctccgctcgccctcgggcgcgggcgggccggccgggcgcgcgcaggggagcggcggttgcgctgggccggagaactgtgggcaccaatcaacggttgccatagcagcgtttgacgtcatcgtgcgtgtggtgcccctgctgccggggctagtgattggaggaaaccccgtgtctgcggagcggctgtagcctgtgagcagccagatcagggacagagtctcagcctcgccgccaccgctgccgccgcccagagactgccgagccgggtccgtgtgccgccacccactccggacacagaatatccagttatggataaaaatgagctggtgcagaaggccaagctggccgagcaggcagagcgatacgatgacatggcagcctgcatgaagtctgtcactgagcaaggagccgagctgtctaacgaggagaggaaccttctctctgttgcttataaaaacgttgtaggagcccgtaggtcatcttggagggtcgtctcgagtattgagcagaagacggaaggtgctgagaaaaagcagcagatggctcgagaatacagagagaagatcgagacggagctgagggacatctgcaacgacgtactgtctcttttggaaaagttcttgatccccaatgcttcgcagccagaaagcaaagtcttctatttgaaaatgaagggtgactactaccgctacttggctgaggttgctgctggtgatgacaagaaaggaattgtggaccagtcacagcaagcataccaagaagcatttgaaatcagcaaaaaggagatgcagccgacacaccccatcagactgggtctggccctcaacttctctgtgttctactatgagatcctgaactccccagagaaagcctgctctcttgcaaaaacagcttttgatgaagccattgctgaacttgatacattaagtgaagagtcgtacaaagacagcacgctaataatgcagttactgagagacaacttgacattgtggacatcggatacccaaggagacgaagcagaagcgggagaaggaggggaaaattaaccggccttccaacctttgtctgcctcattctaaaatttacacagtagaccatttgtcatccatgctgtcccacagatagtttttttgtttacgatttatgacaggtttatgttacttctatttgaatttctatatttcccatgtggttttatgttttaatattaggggagtagagccagttaactttagggagttactcgttttcatcttgaggtggccaatatgggatgtggaatttttacatgagttacacatgtttggcatagttagtacttttggtccattgtggcttcagaagggccagtgttcaaactgcttccatgtctaagcaaagaaaactgcctacatattggtgtgtgctggcggggaataaacaggataatgggtccagtcatgagtgtagtctgtgtgggtactgtaaggcttggagcacttgtgaggctgggacacgaacaccctgtggatgcacgctaagaccgtgtgtctgcgtgcacacccttgaccacagctccagaagttgtctgtagacaaagttgtgacccaatttactctgataagggcagaaacggttcacattccattatttgtaaagttacctgctgtttgctttcattatttttgctacacattttatttgtatttaaatgttttaggcaatctaagaacaaatgtaaaagtaaagatgcagtacaaacgagttgcttggtgttcccggctccatgcggatcaagcacagcggtaaacaaaatcccatgtatttaactttttttttaagttttttgttttgttttgtttttgcttttgtgattttttttctctttttgatacttgcctaacatgcatgtgctgtaaaaatagttaacagggaaataacttgagatgacggctagctttgttttaatgtcttatgaaattttcatgaacaatccaagcataattgttaagaacacatgtattaaagttcatgtaagtggaataaaagttttatgaatggaaaaaaaaaaaaaaaaaaaaaaaaagg

SEQ ID NO: 854 - DNA, 1271 bp, Rattus norvegicus
ttatatttgggttctgcctactgagccgggagtctgggaactacaactcccagagtgctgagcggatgcacgctctgcttttaggtgtaagccgcaaacatcttggaccccgggagaatccgcgttgaagcacagagcatttagctcctctgtcagaatgaatggggaccagaaactggatgttcataaccaagaaaagcagaatttcatccagcacttctcccagattgtcaaggtgctgactgaggatgaactgggacacccagagaagggagatgctattacccggatcaaagaggtcctggagtacaacactgtaggaggcaagtacaatcggggtctgacggtggtacagaccttccaggaactggtggaaccaaggaaacaggatgctgagagcctacagcgggccctgacggtgggctggtgtgtagaactgctccaggctttcttcctcgtgttagatgacatcatggactcttcccacactcgccgggggcagatctgctggtatcagaagccgggcataggcttggatgccatcaacgatgctctgcttctggaagccgctatctaccgcctgcttaagttctactgcagggagcagccctactacctcaacctgctggagctctttctacagagttcctatcagactgagatcgggcagactctcgacctcatcacagcaccccagggccaagtggatcttggtagatacactgaaaagaggtacaaatctatcgtcaagtacaagacagctttctactctttctacctgcctatcgcggctgccatgtacatggctggaattgatggggagaaggaacacgctaatgccctgaagatcctgctggagatgggcgagttcttccagatccaggacgactaccttgatctctttggagaccccagtgtgaccggaaaggtcggcactgacatccaggacaacaaatgcagctggctggtggttcagtgtctgctacgagccactcctcagcagcgccagatcttagaggagaattatgggcagaaggacccagaaaaagtggcgcgggtgaaagcactgtacgaggagctggatctgcggagtgtgttcttcaagtacgaggaagacagttacaaccgcctcaagagtctcatagagcagtgctccgcgcccctgcccccatccatcttcctggaactagcaaacaagatctacaagcggagaaagtaacctcgaattgtagaggctgcgagggaggggtctcaataaattattgttcaac

SEQ ID NO: 855 - DNA, 3072 bp, Rattus norvegicus
cagaagacgcgtctcagccggtgtgtcgcggttccccgcggtgtgtgagtgagccagggcccggtcccctctccggccgccgtcatgggctgcacgttgagcgccgaggacaaggcggcggtggagcggagtaagatgatcgaccgcaacttgcgggaggacggagagaaagcggccaaagaagtgaagctgctgctgctcggcgctggagaatctggtaaaagtactattgtgaaacagatgaaaatcattcatgaggatggctattccgaggacgagtgtaagcagtataaagttgtcgtctacagcaataccattcagtccatcattgcaatcataagagccatgggacggttgaagattgattttggggaagctgccagagcggatgatgcccgacagttatttgttttagctggcagtgctgaggaaggagtcatgacttcagaactagcaggcgtgattaaacgtttatggcgagatggcggggtgcaggcatgcttcagcaggtccagggaatatcagctcaatgattctgcttcatattacctaaatgatttggatagaatatcccagaccaactacattccaactcagcaagatgttcttcggacgagagtgaagactacaggcattgtggagacccacttcaccttcaaggagctctacttcaaaatgtttgatgtaggtggccaaagatccgaacggaaaaagtggatccactgttttgagggagtgacagcaattatcttttgtgtggctctcagtgattacgaccttgttctggctgaggacgaggaaatgaaccgaatgcatgaaagcatgaaattgtttgacagcatttgtaacaacaaatggtttacagacacttcaatcattctcttccttaataagaaagacctttttgaggaaaaaataaagaggagtccattaacaatctgttatccagaatacacaggttccaatacgtacgaagaggcagctgcttacatccagtgccagtttgaagatctgaaccgaagaaaggacaccaaggaggtctacactcactttacctgtgccactgacaccaaaaacgtgcagtttgtttttgatgctgttacagatgtcatcattaaaaacaacttaaaggaatgtgggctttactgagaggatggcatagtaaaagctactacagggaggaatgttgagaccagacatcatctactgtctcttgggtcagcgacaagcatgacaggaccaaggaatggcaacagcatgcagaatctttagcacaatcttctgtattaggaaatgtttaattggcatgagaagagatgatcgagtcagacatgaaattggacaactgtaaagtatgaccggatcatcagggcaccgcttggactttaaatctcaatgtttagggcatattgaagtcgaggtgctgcattccagaacttaaacttgtagcttactgttccccgtctttttaacaaatgaccagtagttaatttctaaggtttttctcatcaagagaacaatacctaaaaactcttacttgtttgcaaaagaatcttctggggactcagtcttaactatgcacacaatgtagccggacatcttgaaatattcctcttagtaggaactgtttgtttttaactcttggaatggtcaggagtaatattccacagctaaaaatcttcctggttattgggactatactaatagagctttttggaatgaagtttatgttactgtcctgtttaaagtatcacaatggcttctaaacagcattcacttcggagagctgtacagtaagattctagctctcgtttcttaagcttacggttggagttaaccttgtttgtgctgattaccaaattactagatgaatactgatgtaatatgataaactgctcttgggtacagacacacgcaggatagctgtcagtcagagacgcagactgctaaggtgagaagcagtgacttgctgctacagatctaccgaggtggccacactgatttgcctgctcgtctcaggcgtgtgggttgtatgcggtggccccttgttttccatctttgtggccttttttgctaggagacgtctaagagtataacaactgtgcatgcctttcctttgtaaatgtgctgccaaatccctgcttgctgtcattgtcactgtatcgatggtaactgcatagcggcccttgctgtgttctttttctaagacttgcattctgggactctgttccaccttgtcacgtgtacagactttaatctgttacagctggcagcagtattaacgcggtgagtaaagagcccaggattgctcctgtttgtaaccgatcctttctggaagccctgccttctgtttctttttgcccctgctgagtgttctttagcctttgagagtgggtttaggtagaaaagtgtttttgaaagtctagttccttgatgtaatagtgatatcaaatctagggctgggggctttatgtccagtctgtgcaagtcatacaagtgtccgatgtgtacagtttgcttgcgctgagagcttcagtcctcttgtacagactgtatcaaatgtcattaaacactgagtggaccactgagggacggcgaaacagaggatgcattttgagcatttcagatcagtagtttgatcagtgccttttgaggtccagtctttgtggattggatccgttcatcttttgatgttacctcctactcatttgaaagaaggttggtggtcagaactgctttgggaagcaagccacggtgatcagtgccttcattggcagcttttaccatttttaattcttacgtgtctttgcgaaatcattattatgcagacagtataactgttatcttacaaatatttccatagggctaagaaagtatcacttgaaagaaaagtattgatttcaatcagcgattgactcaattcccacagtgtaggggttaataagtcttactctcaatttattgttcctttgttgtattctgtaatataagaacatctgggaatgcgaactagtggaatatgttttcataatttttctatactttgggtttaataaaatggtgttgataatc

SEQ ID NO: 856 - DNA, 7258 bp, Rattus norvegicus
  misc_feature (1)..(7258): n = a or c or g or t
taactccaagctggtgcgtagtgtctgagcagctaccagcccaaaagctggagtcaccatggcggcaggagttgcagcctggctgccttttgcccgggctgcggccattgggtggatgccagtggccaactgccccatgcccctagctccagccgacaagaacaagcggcaagatgagctaatcgtcctcaacgtgagtggccgtcggttccagacctggaggaccactctggagcgctatcccgacaccctgctgggtagcacagagaaggagttcttcttcaacgaggacaccaaggagtacttctttgaccgtgacccggaagtgttccgttgtgtgctcaacttctaccgcactgggaagctgcactacccacgctatgaatgcatctctgcctacgacgatgagctggccttctatggaatcctccctgagatcattggcgactgctgctatgaggagtacaaagaccgcaagcgggagaacgctgagcggctcatggatgacaatgagtctgagaacaaccaggagtccatgccctccctcagcttccgccagaccatgtggcgggccttcgagaacccacacaccagcaccctggcactggtcttctactacgtgacaggcttcttcattgcggtctcggtgatcaccaacgtggtggagacggtgccatgcggcacggtgcctgggagcaaggaactgccgtgtggagagcgctactccgtggctttcttctgcctggacactgcgtgtgtcatgatcttcacggtggagtacctcctccgactcttcgcggcacccagcaggtaccgcttcatccgcagtgtgatgagcatcatcgacgtggtggccatcatgccctattacattggcctggtcatgaccaacaacgaggacgtgtccggggcatttgtcacactccgggtcttccgcgtcttcaggatcttcaagttctcccgacattcccagggcctacggatcctaggctacaccctgaagagctgtgcctcagaactaggctttcttctcttctccctcaccatggccatcatcatctttgccactgtgatgttttatgctgagaagggctcctccgccagcaagttcacaagcatccctgcgtctttctggtacaccatagtcaccatgacaacactggggtatggagacatggtgcctaagacaattgctgggaagatatttggctccatctgctccctaagcggcgtcctggtcattgctctgccagtccccgtcatagtcaccaactttagcaggatctaccatcagaaccagagagcagataaacgcagggcacagaagaaggcccgccttgccagaatccgtgtggccaaaacagggagctccaatgcctacctgcacagcaagcgcaatggactcctcaatgaagctctggagctgaccggcaccccagaagaggagcacatgggcaagaccacgtcactcatcgagagccagcaccaccacctgctacactgcttagaaaagaccactaaccacgagtttattgatgagcagatgtttgagcagaactgcatggagagctcaatgcagaactacccatccaccagaagcccttctctgtccagccactcgggcctcaccaccacctgctgctcccgccgtagcaagaagaccacgcacctgcccaactccaacctgccggccacccgcctgcgcagcatgcaagagctcagcaccatccacatccagggcagtgagcagccctccctcaccactagtcgctccagccttaatttgaaagcagacgacggactgagaccaaactgcaaaacatcccagattacaacagccatcatcagcatccctactcccccagctctaaccccagagggagaaagtcgggcaccccctgccagtccaggtcccaacacgaacattccttccataaccagcaatgttgtcaaggtctctgtcttgtaaaaacactggacagagggcctgagggggtagtggggagtaaaggggggctggtatgttgggtgggtggccactgggaccactccctccccactatttctgcctgccccattgcacctccagcactgagacttgtgcctggaagggaaaggaaacagnaaagggtcccaaggatccccctgctggagtggacatagccctgtgacattgcatnttactggggnnngagnaagggnnnnnagggggtgcaggctgcttgcctggacagggnctggtggggggtcctcagacnaaataacagttgtttctggagaccccagtgaggaaaacacaagaccaagagcagcccagaggccgagtcgtcacatgcaaacaggaagaaattataacactgtgtatttaagcacctttttcaaggatcttaatggataatatttattcatgggaaaaggtggaaaacaaaatcatcaatggatattcgtgaaatgtttttctccacgaacccaacacctttaaaccaaaacaatgcattttgtgaggttggtttttatttttcttcttttatagcaaaagcttttaggctcaaagtcagttactgctgagttctctccccattccctggatgggtgaggtcaccttagccgggccctcactgcccagctgacctgcacagaactgtcaagcaaccacacagcaaaccttctgctccgttggtccgtccgtctcctttgtctctgtacctatctgcttcaccttggctgtttctgtgtccaaccatctgtctcgccgtggacagtaaatccttctccgtcactgccaagtactgcagacttgtgcctggggtcaggccgagtgaatgccaatacagaaaagaaaggaagccagtgggctgagtttaagggtgaggtaagtctatattatgaacagaggtgcttgggttttaattggaaccacttatctttgcagtttaggtgggggtggtggtcttgaaattgaaatcagcaacctcagaaagcagttgtttctgctatgccccaatgaagacagaagcaccaagaagctcccacagttccagagcgccttgctgtgtaccctcctttaggatccaccatgaagtccatgcggagctctgccaagaggcttcatgagcatcttcaagtgaggaggatgggaggagaccctggcttaccacccaaggcggttcctaaatagaactgtgaaagttaagcttgtgtatctcatgaagaatgtttcaaagcaagaaagcaagcaagaggctctagatgatcattgcctggtctaaaagatgccatgaggtctgagccctcatctctgaagatagctaatgtgaggccactgatgacctccacacaaatgagggagtgcagattatatcctgaaaatgtggatatgtttgttcaagttatttgcagggtagtgggcctgggaaacagtgtttctggaatcttcctaatcattttcaccacttcacagcagagcaagtgagcctcagggttagtgacaagagtcctttcctgcccttctcaaccccaaatactctattgcagtctctgaagcctaggatctgaggcacatgagctgtttggaatttcttacccattctacagctgtttaaaataaagataagctgttcatttacagctcaaactctctctacccactacagccatctagatgagttttaactagacagcggttaacctgaggacactcatggggcttcctggttccagccccagtgaccctgaatgcagaggagtcctggtgttttgaacggtaccaaaccagaaagtggctagaagggtggaagaaaggggcccttccttccatgtttgtctccctgtcttcatcctcagtggcccgacagtcctttctcctagacctggnnnccnnntcaagatttccccttataggaatggagtggttcttccaatctagtaacttcagacatattttagcagccaaggcatagagccaagctagacccaattttagcaggtaggccaagtagtagaagaggatcttccttttgaagagtggatcatggaacaaaggaatgtctagttgcatgataagccctaagagctgagtggaagaaggataagagttgaaaaggaacacttgaattctcatacaaaccaccgttctatttcagaacaagtcgttagagagttagaataatgactgcttcaaccaaggatgtccatgtcacttgaacagtgcaccaacgcagcatactgtgcttctcatgaaaagaaatatattttaaaacctgcacctccaaaattccatttttattgacttcagagacctgaatcttgtgttgtttctatttcatctccaaagcccatatcatgccagctcctaaaaataatcattaaactgtctgcattttcattcccccattttagtcttgacaagagataaggaaccnaactcacctatgctcaaagataccaacccaagaaaacagctcacagccatatctgctaaaggggattcacggggaagcacagcggnaaaacttcgatcaacttagtaaatctgattcatcagctagtaaggcaacaaccaggataccacgttcttctggagaccaagagctctctgatgcaatgactnnngnnncacagtgtacaaaccatgttagggtatcagtaaattccccactccaccactccattcaaccnttacttagcattggtgnnnnngagtggggaatttactgataccctaacatggtttgtacactgtgagtcattgnnnnnatgaaaaaaagnaaagnnnaaaaaaaaaggtgggaatggncaaagtgaaaaacggcctgtgcttattctacaaggatctcaagtgaacgcagtcctgattgttcaacacagnaagaaaattcactttcacagtcaacaagtcatcttactcagtagaacacaaagtaaatggttcataacttcaatatctgcaaggaaaaatacagtacaaattactaaaaaatactaaaatatagaactgtgttcaggcctccccactacatcaagcgcagcagcaacctgaaatctgaaacttttaataaaannnnngcagnatgcaagagctcagcacnatccacatccagggcagtgagcagccctccctcaccactagtcgctccagccttaatttgaaagcagacgacggactgagaccaaactgcaaaacatcccagattacaacatccatcatcagcatccctactcccccagctctaaccccagannnnntngcatgatgagtgtgagtggtnnaagtctggaatcccactgtctctgtagnnnctccnnnggttactactgctctcactgattttgtttttgtacagattcatcccattnggaggaaatatggtgtgtattacaaactcctccttggagatgggttcattgcttatcggtagcatctggaaagaagtttccctgatttccaggatggagttgtctttcttagtgccagcttctgcatagtcatcctttctcctcctccctttgctgtacgcgcagttccgtgagaacagggacccattcctatgcacataccaacacaccaaagcaaggagggcgatgcttaccaggccacagccccaccaatgatggcnnngnnnggtaaatttggattttngnaaggttctttctcttgctctcgattgagggtggttgtggggttgtacattcgaagaggggcagtttgagtctcaatacaaacaggagtttcatcaaacaggtaaaggttactggtttccatgggaaccatgcatactctatagggtgattcaggttctagagctgtgaccaagtatctactacgttctcctgttacgatggtttccgttatagatccaaannnnnggggttttaatatctggttgtttggtcacaggagctggccactgtccttgagcaggatatgctgtgttaggtattgcggtggttatctgaacggtgctcacaatcccactgtctttacaatcaaacagttctgcactgaggtccttgatagccattccacggaccttttctggagcttggcacatgagcccacgcacattgaccttcacaggtagtgactgcaaccagtctcgtacccatttcatcttgcacccacaataccaaggattgttgcgaagaatcagttgggttatattgtccaaatcatcaaagataccctgaggtaaattgcttaggttattattggacatatcgagtcgatacagctgccttaaataagaaaaagcatttgggggtacccggttgatatggttgtcttgaaggtaaagcttcctcaggctcgtgccgggaaggttcacgggtgcggctgtcaaggaattcctcaccagggacagttctgttaagtttactaagttgaagaaaactttgtcacccaaaccgtggttgttcaacaagtttccatctaaaaccaggcgtttcaggcttgtgagaccgtgaagcgatggggaagagatagttgatatgcgattgtcatctaggcgtaattccnnnnngttctatttcagaanaagtcgttagagagttagaataatgactgcttcaaccaaggatctccatgtcacttgaacagtgcaccaangcagcatactgtgcttctcatgaaaagaaatatattttaaaacctgcacctccaaaattccatttttattgacttcagagacctgaatcttgtgttgtttctatttcatctccaaagcccatatcatgccagctcctaaaaataatcattaaactgtctgcattttcattcccccattttagtcttgacaagagataaggaacccaactcacctatgctcaaagataccaacccaagaaaacagctcacagccatatctgcnnaaaggggattcacggggaagcacagcggcaaaacttcgatcaacttagtaaatctgattcatcagctagtaaggcaacaaccaggataccacgttcttctggagaccaagagctatatgatgcaatgactcacagtgtacaaaccatgttagggtatcagtaaattccccactccaccactccattcaaccttacttagcnnnnnacgagggaaaaagcaatcctttataccctgctgctacagctgtaattccattgcctgtgagttgaagtaaaaaccctcccccgtctccggagcgcggcatccagtgcacacaaagccacagcagctgcagcctgagcccgtcctgcttcagatcactcctgcgctgaggactgcgcgcctcgtgcc

SEQ ID NO: 857 - DNA, 1290 bp, Rattus norvegicus
cccgagggcggggctcctgggaattgggtatctggaccgccgcggtctcttccaaccgccgcccgcacctggtagtgacatcgtccagcccgtgaccatgttcgacaagacgcggctgccgtacgtggtcctcgatgtgatttgcgtgttgctggctggattgccttttataattcttacttcaaggcatacccccttccaacgaggagtgttctgtactgatgagtccatcaagtacccttacagagaagacaccatcccttatgcgttattaggtggaatagtcattccattctgtattatcgttatgattactggagaaactctgtctgtttactttaatgtcttgcattcaaattcctttgtcagcaatcactatatagccaccatttacaaagccgttggagcctttttgtttggagcctcagccagtcagtccctgactgacattgctaagtactctataggcagactgcggcctcacttcctggctgtctgtaacccagactggtcaaaaatcaactgcagcgatggctacattgagaacttcgtatgtcaagggaatgaacagaaggtcagggaaggcaggttgtccttctactcggggcactcctcattctctatgtactgcatgctgtttgtcgcactttatcttcaagccaggatgaagggagattgggcaagactcttacgacccatgctacagtttgggcttgttgctttatccatatatgtgggcctgtctcgagtttctgattacaaacaccactggagcgacgtgttaattggcctcattcaaggagctgttgtggcaatattagtggttttgtatgtaactgatttcttcaagaccacagagtctaacaaagaaagaaaagaggactcacatacgactctacacgaaaccaccaacagacagagctacgcaaggaatcatgagccctgaagggtgcagaggaacaggccagcttcgaagggaactgctggaggcagagggcaggaagatgcatatcactccctggtgtatacattaaagggctgctgctatacctcttggatgcccactttatctatgtatatagttactttaacacaatgagttttttgagtttttaattgaactagtagttcaattaaaaaaaatttaagcctttcactaaaacactgccccacctgtacatttttttattgaaagatgctatgtacaaatgtgtatgttacatgccttctcagaatgatatttgatttaaatataataaaaatgcttgcgaacaaaaaaaaaaaaaaaaa

SEQ ID NO: 858 - DNA, 4153 bp, Rattus norvegicus
tcgggcgccgcgcgagcctgccgctgccatgcctccgcgcgcgccgccagcgcccgggccccggccgccgccccgggccgccggccggcacgggctctcgccgctggcgccgcgcccctggcgttggctgcttctgctcgctctgcccgccgtctgctccgcgctgccgccgccgcgccccgtctacaccaaccactgggcagtgcaagtgctgggcggccccggcgcggcggaccgcgtggctgcggctcacggctacctcaacttgggccagattggaaatctggacgattactatcatttttaccacagcaagaccttcaagagatcaaccttgagtagcaggggcccccacaccttcctcagaatggacccacaggtaaaatggctccagcaacaggaagtgaaacgcagggtcaagagacaggcgcgaagcgactctctttatttcaatgatcccatttggtccaacatgtggtatatgcattgtgctgataagaacagtcgctgtcggtcagagatgaacgtccaggcggcatggaagcgcggctacacaggaaagaacgtggttgtcaccatcctcgatgacggcatagaaaggaatcacccagacctggcccccaactacgattcctatgcaagctacgatgtcaacggaaacgattatgacccatcaccgagatatgatgccagcaacgagaacaaacatggtactcgctgtgcgggagaagtcgctgcttcagccaacaactcctactgcatcgtgggcatagcatataatgcaaagataggaggcatccggatgctggacggtgacgtgaccgacgtggttgaggccaagtctctgggcatcagacccaactacattgacatttacagcgctagttgggggccagatgatgatgggaagaccgtggatgggcccggccgtctggctaaacaggctttcgagtatggcattaaaaagggccgccaaggtctgggctccatttttgtctgggcctctgggaatggtgggagagaaggggaccactgctcctgtgatggctacaccaacagcatctacaccatctctgtgagcagcaccactgagaacggccacaaaccctggtacctggaggaatgtgcttccaccttggctaccacctacagcagcggggccttctatgaacggaagatcgtcaccacggacctgcgtcagcgctgcaccgacggccacactgggacatctgtctcagctcccatggtggctggcatcattgccctggctctagaagcaaacaaccagttgacctggagggacgtgcagcacctgttagtaaagacgtcacggccggctcatctgaaggcgagtgactggaaagtcaacggagctgggcataaagttagccatctctatggatttggcttggtggatgctgaagcgctcgtcctagaggcaaggaagtggacggcagtgccatcccagcacatgtgcgtggccaccgcagacaaaaggcccaggagcatccccgtagtgcaggtgctgcggaccacagccctgaccaatgcctgtgcagaccactctgaccagcgtgtggtgtacctggagcatgtggtagtccgaatctctatctcacatccacgacggggtgacctccagatccacctgatttctccctctggaaccaagtctcaacttttggcaaagagattgctggatttttccaatgaggggttcacgaactgggagttcatgactgtccactgctggggagaaaaggctgaaggtgaatggaccctggaagtccaggatataccatcgcaggtccgcaacccagagaaacaaggaaagttgaaagaatggagcctcattttatatggcactgcagagcacccataccgcaccttcagctcccaccagtctcgctcacggatgctggagctttcagtcccggaacaggagcctctcaaggctgagggaccaccaccgcaggcagagactccagaagaagaggaagagtacacaggtgtgtgccatccagagtgtggtgataaaggctgcgatggtcccagtgcagaccagtgcttgaactgcgtccacttcagcctgggaaactccaagacaaacaggaagtgtgtgagcgagtgccccttgggctactttggggacacagcagcaagacgctgccgtcgatgccataagggatgtgagacatgcacgggcaggagcccaacacagtgcctgtcttgtcgccgtgggttctatcaccaccaggaaacgaacacatgtgtgaccctgtgtcctgccggactttatgctgatgaaagtcagagactctgcctcaggtgccacccgagctgtcagaagtgtgtggatgaacctgagaagtcgactgtgtgcaaggagggattcagcctcgcacggggcagctgcattccggactgtgaaccaggtacctacttcgattctgagctcatcagatgtggggaatgccatcacacctgccggacctgcgtggggcccagcagagaagaatgtattcactgtgcaaaaagcttccacttccaagactggaaatgtgtgccggcctgtggtgagggcttctacccggaggagatgcctggcttaccccacaaagtgtgtcgaagatgtgatgaaaactgcctgagctgcgagggctccagcaggaactgcagcagatgtaaagctggcttcacgcagctggggacctcctgcatcaccaaccacacgtgcagtaacgccgatgagaccttctgcgagatggtaaagtccaaccggctctgtgaacggaagctcttcatccagttttgttgccgcacctgcctcctggctgggtagggcgggcgccagctgccacagagggcagggtcctcctgtctgcccttttgcccagctaccttcctacagatggccagccatagcccattccttggggtggccctgagtctgacagctgtgccctcccccccccagagctgggtcccactgcagcatctctgagcacctgaactaggtggaggtggcccttaaggataaggctaaatcggcaaaaatccccctgaactctgcttgctggctgcagtctaaagctggactcgaaataggaacagagtgaattatgagactcatgcctgcagcttgggagtggcttctgggaccctagtttactgaaacttcaagaccaaagcagaaaaagagagatgcctggcatcccatcaagtcctcctcccacacattcgtgtgaccgtgacagatctcaccgagttggctggcaggaccccatgctgtcctcacctataatgaagggcctcgcttcctccccatgcatcactggccaccaaacagcctgagggatggtttgatgagactgtaaataaaataggtttcagggcataagatgtatgaccactggggatagaacctatgtctacacagctccttccgaaactacagccccctgactggaaggtccggcaccagactgaagtaggtctactcatcctctcctcagcattctcctctgagtgagctgagctgtccaagtgactgttcaacctgtgtcccagggcctcctgggcctgagccaccagtcatctacagatacagagcctgtggaggagggtccaaaggagctacttaaggctagccgaaagacctctaatggccaagcagttcctccttatgcaaagccagccccaaatcactaatcgccagccctccatggcacacaactgcttctcaagtgcatttggcctccacactcaggactctgttctcgggtggacactgctctggcccagtatagtacaagcctacgttgatagagctggattgatttttctgccaagcctgtgtgggcattttataagctacgtgttctaatttttaccgatgttaattattttgacaaatatttcatatattttcattgaaatgcgcagatctgcttggtccagttccctttaacgtgggaataacatttgccttaaatttttccaacctcgtctctctccatatggtcctgctctcctctctgaatataatgtgttttgtcttgtcacctgtaagtggcaaggactcagctgttgtctgttgaatccacaacttcaaataagaaatcagtgaagcaaatctaatgttaaccctgag

SEQ ID NO: 859 - DNA, 794 bp, Rattus norvegicus
ccgcaccgctccgcgtgcaccgcactcgctccgactgtcaggctagcgccactgtccccagccgtcaccatgatcatctaccgggacctcatcagccatgacgagctgttctccgacatctacaagatccgggagatcgcggacgggctgtgcctggaggtggagggcaagatggtcagtagaacagagggtgccatcgatgattcactcattggtggaaatgcttccgctgaaggtccggagggcgaaggtaccgaaagcacagtagtcaccggtgttgacattgtcatgaaccatcacttacaagaaaccagcttcacaaaagaggcctacaaaaagtatatcaaagactacatgaaatcactcaagggcaaacttgaagaacagaaaccagaaagggtaaagccttttatgactggagctgcagagcaaattaagcacatccttgctaatttcaataactaccagttttttattggtgaaaacatgaatccagatggcatggttgctctactggactaccgtgaagatggtgtgactccattcatgattttctttaaggatggcttagagatggaaaaatgttaacaaattggatctatcgcctgtcaccataattggctgctgcttaccatccatacaacaccaggacttaggacaaatgggactgatatcatcttgagcttttattttgaccgtgatttatttggagtggaggcattgtttttttttttttttaaagaaaaaaaaacatgtcatgtgggttgtctaaaaataaagtgcatttaaattca

SEQ ID NO: 860 - DNA, 528 bp, Rattus norvegicus
aatactagcaactttcattctttggaacttgtgctgaaaaaaagaagagtcagcaaatactactgaaagtgcaatattcgattatcactgcgagatgagctttgatccaaaccttctccacaacaatggacacaacgggtaccccaatggtacttctgcagcactccgtgaaactggggttattgaaaaactgctgacctcttatggatttattcagtgttcagaacggcaagctaggcttttcttccactgttcacagtataatggcaacctccaggacttaaaagtaggagatgatgtggaatttgaagtatcatctgaccggaggactgggaaacctattgctattaaattggtgaagataaaaccagaaatacatcctgaagaacgaatgaatggacaagttgtgtgcgctggtcctcacaacttagagagtgaatctgcagctgccccgggtcagagtccaacatggagtgtatgctacgaacgtaatggggaagtattttatctgacttacaccctcgtgcc

SEQ ID NO: 861 - DNA, 829 bp, Rattus norvegicus
gttcacttccagccgccttacaagtctctccagtcgccagcctccgggaccactctccttgccgccttcgcgtccctaggaccagccagcccgccggtcttcgcggttagctccatactccggatcagccatgacctctcagattcgtcagaattattccaccgaagtggaagctgccgtgaaccgcctggtcaacttgcacctgcgggcctcttacacctacctctctctgggcttcttttttgatcgggatgacgtggctttggaaggcgtaggccacttcttccgcgaattggccgaggagaagcgcgagggcgccgagcgtctcctcaagttgcagaacgaacgcgggggccgtgcactcttccaggatgtgcagaagccatctcaagatgagtggggtaaaaccctggaggccatgaaggctgccttggccctggagaagaacctgaaccaggccctcttggatctgcacgccctgggctctgcgcaggcagaccctcacctctgtgacttcttggaaagccacttcctggataaggaggtgaagctcatcaagaagatgggcaaccacctgaccaacctccgtaggtggcagggcccacaaccagcgcagactggcgtggcccaggcatctctgggcgagtatctctttgagcgcctcactctgaagcacgactaggcctctgtgccttccaaggggctgccctcttctgctctgcaccgaccgcctcagcacctccaccgaatgaacctctaaagccactaggcagctttgtaaccgccctggagcctctcccaagtcttggacccaagtaaaaataaagct

SEQ ID NO: 862 - DNA, 6244 bp, Rattus norvegicus
gaggtccatgggcgctcacggtcgtcctcgcccaccctcgcggggtcggcgcccatagcacctcagcagcacccggcgacaccccggctgagccaggggaccctcaccttgagcagcccgcgcccctcccctcctctccaccccagctcccgccccctgctcgcctccgctcccggctggggtccgctgccgctcagccgcccgcaaagctccctccctgcggccacccagttggcctccaccccgcggcgcacaggctctccgcggagtcctcggggataccgagggagtgcgccggggcagggcgagtcgcacggccggagactgcccgcgatggcgggagcctggctcaggtggggactcctgctctgggcagggctgctagcgtggtctgcgcacggccgggtgcggaggatcacgtacgtggtgcgcccgggcccgggactgccggccggaaccctgcctctggctgggcccccgcggaccttcaacgtcgcactggacgccaggtacagccggagctcaacagccacctccagccgctccttggccgggcccccagccgagcggacccggcgcaccagccagcctggcggcgcggccctgcccgggctccgatctccgctgccacccgagcccgcgcgtccgggggcgcccagccggcagctccactcaaaggccggtgctcagaccgcggtcactcgcttcgccaaacatggcaggcaagtcgtgcgctccaaagtgcagcaggacacgcagagctccgggggctccagactgcaggttcagcagaagcagcagctgcaggggatcaatgtctgtggagggcagtgctgccatgggtggagtaaggccccgggctcccagaggtgcaccaaaccaagctgtgttccaccatgccagaatggagggatgtgtctccggcctcagttctgtgtgtgtaagccagggacaaagggcaaagcctgcgagatcacagctgcccaggacaccatgtcaccagtgtttggagggcagaaccctggctcctcgtgggtccctcctgagccagcagcaaagcgtacttcaaccaagaaggcagacaccttaccaagggtcagtccagtggcccagatgaccttgaccctcaagccgaagccgtccatgggactctcccagcagatacattctcaagtggcacccttgtcttcccagaatgtgatgattcggcatggccagacccaggagtatgtgctcaagcccaagtacttcccagccccaaaggtggtctctggagagcagtccacagaaggctctttctctttaagatatgggcaggagcaaggcacagcaccctttcaggtgagtaaccacactggtcgcatcaaggtggtctttactccgagcatctgtaaagtgacctgcaccaagggcaactgtcacaacagctgccagaaggggaataccaccactctcattagtgagaacggccatgcagccgacaccctgacagccacgaacttccgagtggtaatttgccatcttccatgtatgaatggtggccagtgcagttcaagggacaaatgtcagtgccctccaaatttcacaggaaagctttgccagatccctgtccttggtgccagtatgcctaaactctaccagcacgcccagcagccaggcaaggcactggggagtcacgtcatccattccacacataccttgcctctaaccatgaccaaccagcaaggggtcaaagtgaaatttccccccaacatagtcaatatccatgtgaagcatcctcctgaggcttctgtgcagatacaccaggtttccagaattgatggcccagtgggccagagggtgaaagaagtgcaaccgggccagtcccaagtctcttaccaagggctgcccgtccagaagacccagacagtccattccacatactcccaccagcaggtcattccgcatgtgtatcccgtggctgctaagacacaacttggacgatgcttccaggaaaccattgggtcacagtgtggcaaagcgctccctggcctttcaaagcaagaggactgctgtgggacagtggggacctcctggggctttaacaaatgccagaaatgccccaagaagcaatcctatcatggatatactcaaatgatggaatgcctacaaggatataaacgggttaacaacaccttttgtcaagatattaatgaatgtcagctccaaggcgtatgccctaatggggagtgtttgaataccatgggcagctacagatgctcctgcaaaatgggatttgggcctgaccctaccttttcaagttgtgtgccggatccccctatgatctcagaagagaaagggccctgctaccgcctcgtcagtcctgggaggcagtgtatgcaccctctctctgttcacctcaccaagcagatctgctgttgtagtgtgggcaaggcctggggcccacagtgtgagaaatgtcccctcccgggcacagctgcttttaaggaaatctgtcctggtggaatgggttatacggtttctggcattcatagacgcaggccaatccatcagcatataggtaaagaagctgtatttgtcaagccaaagaacactcaacctgttgctaaaagtactcatcctccacctctcccagccaaggaagagcctgtggaggccctgacctcctcgcgggaacatgggccgggagtggcagagcctgaagtggtaacagcacctcctgagaaggaaataccctcactggatcaagagaaaacaagacttgaacctgggcaaccccagctctccccaggggtttcaactattcatctgcacccacagttcccagtagtggttgaaaagacatcccctcctgtgcctgtggaggtggctcctgaaggttctacatcaagtgccagccaagtgattgctcctacgcaagtaacagaaatcaacgaatgtactgtgaacccggatatttgcggagcaggacactgcatcaacctgccggtgaggtatacctgcatatgctacgagggctacaagttcagtgagcagcagaggaagtgcattgacattgatgaatgtgctcaggcccagcatctctgctcccagggtcgctgtgagaacacagagggaagtttcctgtgtatttgcccagcagggtttatagccagtgaggagggttctaactgtatagatgtggatgaatgtctgaggcccgatgtgtgtagggacggccgctgcatcaacactgctggggccttccgatgcgaatactgtgacagtgggtaccggatgtcacgacggggccactgtgaggatatcgatgagtgtctgaccccaagtacctgtcccgaggaacaatgcgtgaattccccaggttcttaccagtgtgtgccctgcacagaagggttccgtggctggaatggacaatgcctcgatgtggacgagtgcctgcagccaaaggtctgtaccaatggttcctgcaccaacctggaaggctcctacatgtgttcctgccacaagggctacagccccacaccagaccatagacactgtcaagatattgatgaatgtcagcaagggaacctgtgcatgaacgggcagtgcaaaaacactgacggctccttccggtgtacctgtgggcagggctatcagctgtcagcggctaaagaccaatgtgaagatattgacgaatgcgagcaccgtcacctctgctctcacgggcagtgcaggaacacagagggctccttccagtgtttgtgcaaccagggttacagagcatctgtgcttggagaccactgcgaggatatcaatgaatgcttggaggacagtagtgtctgccagggaggtgactgcatcaatacagcagggtcctatgactgcacgtgcccggatggactccagctgaatgacaataagggctgtcaagacattaatgaatgtgcacagccaggactctgtgcacctcatggggagtgtctaaacacacaaggctcattccactgtgtctgtgaacaagggttctccatctctgcagatggtcgtacttgtgaagatattgatgagtgtgttaacaacactgtgtgtgacagtcacggcttctgtgacaacacagccggctctttccgctgcctctgttatcagggctttcaagccccacaggatgggcaagggtgtgtggatgtgaacgaatgtgaactgctcagtggtgtatgtggggaggctttctgtgaaaatgtggaagggtccttcctgtgcgtgtgtgccgatgagaaccaggagtacagccccatgactgggcagtgtcgctcccgggctactgaagattcaggtgtggatcgtcagcccaaagaagaaaagaaggagtgttattataatctcaatgatgccagtctctgtgataacgtgctggcccccaacgtcaccaaacaagagtgctgctgtacatcgggcgccggctggggagacaattgtgagatcttcccttgcccagtccaggggactgctgagttctcggaaatgtgccctagaggaaaaggttttgtccctgctggagaatcctcttacgaaaccggtggtgagaactacaaagatgctgacgaatgcctgctgtttggagaggaaatctgcaaaaacggttactgtttgaacactcagcctgggtatgaatgctactgcaaggaagggacatactacgatcctgtcaaattacagtgttttgatatggatgaatgccaagaccctaacagttgtatcgatggccagtgtgttaatacagagggctcttacaactgcttttgcacccacccaatggtcctggatgcctctgagaagagatgtgtgcagccaactgaatcaaatgaacaaatagaagaaaccgatgtctatcaagatctgtgctgggagcatctgagtgaggagtacgtgtgtagccgtcctcttgtaggcaagcagacgacatacacagagtgctgctgtttgtacggggaggcatggggcatgcagtgtgctctctgccccatgaaggactcagatgactatgcccagctgtgcaacatccctgtgacaggacggcggcgaccatatggacgggatgcgttggtggacttcagtgaacagtatggcccagaaacagacccttacttcattcaggatcgctttctaaacagctttgaggagctacaggctgaggaatgtggcatcctcaacggctgtgaaaatggccgctgtgtaagggttcaggaaggttatacttgcgattgctttgatggatatcatctggatatggccaagatgacctgtgttgatgtaaatgaatgcagcgagctgaataatcggatgtctctctgcaagaacgccaagtgcattaacacagaaggctcctacaaatgcgtgtgtctaccaggctacgtaccatctgacaagcccaactactgtacaccactgaacaccgctttgaatttagacaaagacagtgacctggagtgaaggagaagctacgtaacctatgcccatatactctgcactgtgtaaaggaaaagggagagaggtatacttgagacactgcacctaatccagaccatggcaaagaaggaaacaacgtggagttgcgtgaacccccaaagaaagtgagcggatggagtagcagcctgagaggtgcgacagaccaaatggacatttcctcaaaaacccagtatatatagtctgttcatatgtaaaattcaatggaaaagaggcaggatgcggctgtcattttaaacagaggttgtattattatcttgttttgatttttttttttactattgcttaaatttggcttttaaatagtggtgacgatgttttatatgagtcttctctgtgctgtgcagatccccagccaccattttttcttcagcgataatctcaagtgcaaacatctttgataacgtattgttaaactgtattataagtatgacacagggttgtgctgtcccttggtccggagactttgaaaaacaaattgtctgtcctgtggagcaggcagtgactgttaaacttttatctacatttagagtgggtgggaaaacacctttattttcaatgtattatcggattgcctgtcaattggatcccttacttgggtggaaatggaggagtttcttagcatttattagcactgtgttgtgtaaagtcaacccagaaaaatttaaaaacctgaaatccccccctcaaaatatttaccattgtatgttataagaaaataaaatcgccatttttgtag

SEQ ID NO: 863 - DNA, 3923 bp, Rattus norvegicus
ctgaggctggcagctactgaaactgacacacacagggttaaacctatttgctgtggccatccctcctccccctagtcccccttttcactgtaggctggcagcagtcctaactgcctactgaagccaaatgcttgaggagagagagagtaaggagccagccatgaatcctttccagaaaaatgagtccaaggaaacgcttttttcacctgtctctactgaggagatgctgcctagacctccgagccctccaaagaagtcacctccgaaaatctttggctccagctacccagtcagcattgccttcatcgtggtgaatgaattctgcgagcgattttcctattatggcatgaaagctgtgctgaccttgtacttcctgtatttcctgcactggaatgaagacacgtccacctctgtctaccatgccttcagcagcctctgctatttcactcccatcttgggtgcggccattgctgactcctggctgggaaaattcaagacaatcatctatctctccctggtgtatgttcttggccatgtattcaagtctttgggtgccataccaatactgggaggaaaaatgctacatacaatcttatcattggttggtctgagtctaattgctctgggaacaggaggtatcaaaccctgtgtggcagctttcggcggagaccagtttgaagaggaacatgcagaggcacggactagatacttctcagtcttctacctcgccatcaatgcggggagcttgatttccacgttcatcacacccatgctgagaggagatgtgaagtgttttggccaagactgctatgcactggcttttggagttccaggattgctcatggtgctggcacttgttgtgtttgcaatgggaagcaagatgtacaggaaaccacctcctgaagggaacatagtggctcaagttatcaaatgcatatggtttgctctctgcaaccgcttcaggaaccgttctggggaccttccgaagcgacaacactggctagactgggcagcagaaaaatatccaaagcatctcatcgcagatgtgaaggccctgaccagggtactgtttctttatatcccactgcccatgttctgggcacttttggaccaacagggctcgcggtggactctgcaagctaacaagatgaatggtgacttgggtttttttgtacttcagccggatcagatgcaggtgctaaatccctttctggttcttatcttcatccccttgtttgaccttgtcatttaccggctgatctccaagtgcagaattaacttctcatcactcaggaaaatggcagttggtatgatcctagcgtgcttggcttttgcagttgcagcacttgtcgagacaaaaataaatggaatgatccatccccagccagcttcccaagagatatttttacaagtcttgaatttggcagatggtgatgtaaaggtgaccgtgctgggcagtagaaataattctctcttggtggagtccgtcagctcttttcagaacacaacgcactattcaaaactacacctggaggcaaagagccaagatttacattttcatctgaagtataacagcttgtctgtccacaatgaccattctgtagaggagaagaactgttaccagctgctcattcaccaggacggggagagtatctccagcatgctggtcaaggatacaggaatcaaaccagccaatgggatggcagccatcaggtttattaacactttgcataaagacttgaacatctccttggatacagacgctcctctcagcgtgggcaaagactacggagtgtctgcatacagaactgtgctaagaggaaagtatcctgcagtgcactgtgaaactgaagacaaagtcttttctctcgatttaggtcaactagactttggtacaacatatttgttcgtgatcactaatatcaccagtcagggtcttcaggcctggaaggcagaggacattccagtcaataaactatccattgcatggcagctaccacagtatgtcctggttacagcagcagaggtcatgttctcagtcacaggacttgaattttcttattctcaggcaccatctagcatgaaatctgtgctccaggcggcctggttgttgaccgttgcagttgggaatatcattgtgcttgtcgtggctcagttcagtggcctggcacagtgggccgagttcgttttgttttcctgcctcctcctggtggtctgcctgatcttctccgtcatggcctactactacgttcctctaaagtcagaagatacccgtgaggcaacagataagcagattcctgccgtgcaggggaatatgattaacctagaaaccaagaatacaaggctctgatgacttgctgatggatacctgacccctggctctgatttcagccactgcttattttcaagcaacaaccattttcctcaggccaggttaggagaaggagacagcatctatctgaatggattgcctccagttccctaccacagtagaggcaattctaggactaagttttcagatacatctttaaacagggatccgagactccgtgccctacaggccgttgatcaacttggtaaacgtcaggtgatgtctctcaggctggcccagtatctccgagtgcccatgaaaaatacaaatgtgtagaagagataagtctcacgggtctgctaagtttgagggattcctttaccaggtatttggagcctatagctctacttgtcgatgtgttggttacagaatactggttttccaagtttctttatcagtcgtataacttcgctattcatgaggatgtcaaaaaacgttacatatagtatgacccaatccagaggctagcttgtcagctaggaagtctaacatgattttaatagatggcagactatagaatggcgttgtatctacacatggaagatacctcttttctgatttaccacagtggtttatcaacttacccaaccaggcttttctcagatcctgaaaaccacaattaaggacagtagtcagaatcgtggggacacgggggtgcacataaactattcattctcctgtactacaggatactaaagaactctcctgctcctggcctgggcgtgctcctctgtgaacatctgtctaagaaactaactataactttgcaacccaggcttttccgtggcgctgggacagcttatctttttcagtgcatcttattctgcgtattacagcaagtcttcaataacaaaatgttcttctaacccaacttcctgtaatttttttctatttagctcctttgttatgcatctttacttttcctgtaatttttgtttacatttctccctttgggcttagcagtttcttgtttattgaaaagggataatactaacatcctaggtctgaagcgctaaactgtgctagtcatcaaatggacaaggacctgcatgagaaacttattaaaaatctgtggcgaggtgggacaggtgcaggttttgtttgtgcgtgtgaacaaaaggagttgagaggcattgtctcacgtgtaataacgtgggtcaggggacgagtttgggatgtcaggactgtgtcatgtattcctaggagaaaacgttccctgcccctatatgaaagacctctcatttctgttccttttactacactgttcccttcaacggccatgttgaattgcacattattagtaatgtaatatattcttaagcgaatctgctccagttcgtcaagctttaaatacttcagtatttaagtaccgagatttcagaaagcataaaagaggtcacaataccatctactttcctcagatgacttaatgagaacctgtccagactcctttagaaggtgttcactttccagaagctttaactcaaactctttgatgaattttgttttaaaagatgttaacactgatctgtgaataaaattttttacatac

SEQ ID NO: 864 - DNA, 1118 bp, Rattus norvegicus
acgactggtatcagattaatgtcttgtatatctgaattccgcggaattacgcagcattcaacagagagaagagacctgggactaaaactgggattccaaaaagaatcctgcagtgtggcagcctgcttctcaccttctcacctcggagttggctgaacccagaaccaaatgctttgcacgtctcccgtcaactgcttggactcagtttgttgcacttcgataaatatctcttcactggtccgaagagctgccctcacacacaatgacaaccacttcaactatgagaagacacacaacttcaaggtgcacacatttcggggcccacactggtgtgaatactgtgccaattttatgtgggggctcatcgcccagggagtccggtgttcagattgtgggttaaacgtacacaaacaatgttccaagcacgtccccaacgactgccagcccgatctcaagaggatcaagaaagtatactgttgtgatctcaccacacttgtaaaagctcacaacactcagagacccatggtggtggacatatgtattcgggaaattgaagcaagaggattaaaatcagaagggctttacagagtctctgggttcacagaacacattgaagatgtcaagatggcgttcgacagagatggtgaaaaggcggatatctctgctaacatctacccagacataaacatcatcaccggagccctgaaactgtacttcagagacttacccatccccatcatcacatatgacacctataccaagtttatagaggcagcaaaaatctccaatgcagatgagaggcttgaagctgtccatgaggtcctgatgctgctgcctcctgcccactatgagaccctgcgctacctgatgatccatctcaaaaaggttaccatgaatgaaaaggacaatttaatgaacgcagaaaatctggggatcgtgtttgggcccaccctgatgagaccccctgaagacagcaccctcaccaccctccatgacatgcggtaccaaaagctgatcgtgcagattttaatagaaaacgaagatgttctgttttagtccatcagggaagtgcagctgatagagctagtggaataaaaacgtttctcaaaaaaaaaaaa

SEQ ID NO: 865 - DNA, 2745 bp, Rattus norvegicus
gatccaatggcgaccccagaggccagcggcagcggcaggaatggccagggctccgaccccgccgtcacctactaccggctggaggaggtggcgaagcgaaataccgcggaggagacgtggatggtgatccacgggcgagtctacgatatcacccgcttcctcagcgagcatcctggtggagaagaggttctactggaacaagctggtgccgatgcaactgaaagctttgaagatgtcggccactcccctgatgccagggagatgctaaagcagtactacattggtgatgtccatccgaatgaccttaaacctaaagatggtgacaaggacccttcaaaaaacaattcatgccaaagttcctgggcatattggattgtccccatcgtgggtgctattcttataggtttcctgtatcgtcacttctgggctgacagcaaatcctcctgaggaggccacgttgaagtgtcggagcacatctcctgggagtgagaggtggagacttgtgtggaggctgcagggtgctccttccttggatcctgccagttgttttctttccccttggagccaagatggttgaccagatatctatcctccttcaatgcaggaccagaatctgtccatcagcctgagcctgacgcccaaagcacctgctcacgttgtgtccttgtcagggtttcttctcactggttcccactcattcccttcatttcaacagttgatgccaatgacttagagttcctttgttgtagtgacatggcctttggggacagtacatgatttctgatactttgaattcacagtagacatagttaagggaacagcggtctagttttgagtctttccccatttttcttttaagtaaatttttttaattctgatttaattttgtcattcatgatgataagggatttaattcatgaagttgtgtagctcttgtttcaaacacagctgccaaatgatcttacttatgattgttagaagtaaggagccagcaaaatggctcactggataaaagcaattgcagaaaaaccaatgacctgtgtttgagtccctgtacccacagggtagaaggaagagaaccagttcccaaaagttgtcctctgacttccacatgtgtgctgtggtctttgtgtacacacacacacacacacacacacacacacacacaccccagatgtaaattttaaaaatagaatacaacagtggttgtcttcctcccagatagtgtagctgatggcccctcctgtcttttttcccatgagtatgtcaccaaactgtgcatccctttgattttttaggggtataagagctgaagaagggccaacttgagaataatctcatttacaaaaagaaccaaacactacttataggctagcagtctaaaaagtgactggcatgcactctctggtctgcccttggtccctgaccgtcttccgtcctggctgtctttactggtggaagttgaaggtgtgggtatccatgggacttctgtccggtccggtccgcggggcttcacaagaggcttgctgcttttctgtttactgattagcaagtttctgtttccctgtttgaaagtaagagactcaagtttgatcttccgtttctctcagtaaataactcacatgtaaatgtcattgtccacacaccatttctgatcgggagaccatgccaagagacttctgttttcatttgggctctacctccatggctccaggttggtgattttgtcctacttttgaggataatgataaatctggaagcttttttcccccttggatatgaatttcattggaaagtaggcagtcatttaaaattccttttcttactggtccaggcattttcctggcatctctgactgtattctctctccctgtggcagtgcccgacagtacccagctgtttcttagtttctatgattttccttcacatgtttggtcattgctagtcagcttctgagctggtgtcacatccagtaggaagccatggaatcccagcgggaccagagatattgggaagtgtcctcctgcttcccttctaccctgccaggggcttgacaagacaggacactacacagtacaccagtctgcccaagcaaactgttttaaaaaaagttcagcccaggacttttatcctgtgattttagcagttgaatgaattcagaagtcatcaaaataacattagccttttccttgcatacttggatatgatattttagagtgatttctaggtgacttttatacatcgaagatgaaggcttaacctttcatttttagaacgtctgtaatactgtgtcacttattgacagcgttgtcactctgtaacagcagtggcatgcccagcgcacctccacttaaaggcagggaaggcttgtgtgcagggaggctgggatccacttttgaggatagccaagtcacatggagtatatggagtatgctgggtaagaggaaaggacgagagtgtgggatgggggcgttccagccaataccaaacctgatggtgtgcctagtgaaaacacctggcataggaaattaggtaaagaactacatttttggctgggcatgttgatgcacacctttaatcccagtataagagaagcaggggctggaaaatctcttgagttattgccagcctgctctacatagcaagttctaggacagtcagggctacatggagagaccatgtcacaaccactccaccaaataaaagaactgtattttcaagtaaaaaaaaaaaaaaaaaaaaaaa

SEQ ID NO: 866 - DNA, 667 bp, Rattus norvegicus
ccagtgacagatttatataatttcaatgtaaacttttgctgcagcatggagaccggtcatatctcattggtagatgtacccaaagccctcaaccagggcggtgacagctacacttgcttgaaagaaaattagtccttgccagccgcagcaggatcagatcggtatttctccttgccactgtggacagccacaccagtatgacaagttgacagttcccagtgtcttcaagagcctctctaggctactgccagtggcttctggtctcagagctcattgtgccgagcccttgagaccctgctggacaggtcctgcagatgcttcttcaccttgtagcccagctcctttgtcttctcctccagcaggacgtacttctccttgttgcggctgatgtgctcggggtcaccgatgctctccacgtgcttcagcttctggtgggaaatctccagctgcttctggtagtggttgtgcttttcgattttggcctcgaagtgcttaagctcctccctgaacgactccagttccttctcggtgaagttggcagactgagccaggtcccacagatctatcactcggggctcttcaaactcagtggcggggccgtagccctggtggctgaccttcctcaagcggtctaggccctggttgatactacgcaatctgtccttta

SEQ ID NO: 867 - DNA, 494 bp, Rattus norvegicus
gagaatagggagaagggctatggtaggcaaaagcagtataggtacacttggacatgtttctgatccaagtctctgtgggtaagatgaaagtcagatgacctaggaacactcagcacgggacaaactcttctccacagtgttctcttcgtgagtgacctggcagctgtaattgctatgagtctcccatgcttttgctgtcaaaagcaggtagctggtagccatgtacttgttgttctgtttgaaaggctgggtagtctccacaccctgagtgataggggtaccatctgccttccagaccactgtcataacaccagggtagaaatctgtcaccatacacaccagtgtagccttgtcagtcttgagctcttcagaggaaggtgggaacagggtgactgagggcgtagccttgggttggtctaggacagtcaatctggttcctttaccgagtacctcgaagtttatcatcactatatgttgagtgacagtaattatca

SEQ ID NO: 868 - DNA, 507 bp, Rattus norvegicus
cggtggggtgctgtgcgtcggcggatcaggcggtcatgtggagcctccgcggcctgcgcctggcggctggacattgttttaggttatgtgaaagaaatgtttcctcgccactaaggttaaccaggaacactgacttgaagaggatcaatggattctgcaccaagccacaagaaagtcccaaagctccaacccagtcttacagacacagggtgccgcttcacaagcccacagacttcgagaagaagatcctgctgtggtcaggccgcttcaagaaggaggaagagatcccagagacaatctcgtttgagatgcttgacgctgcaaagaacaagatccgggtgaaggtcagctatttaatgattgccctaacagtggcaggatgcgtctatatggttattgagggcaagaaggctgcaaaaagacatgagtctttaacaagcttgaacctagaaaggaaagcccgtctgagagaggaggcagctatgaaggccaaagcggactagacgt

SEQ ID NO: 869 - DNA, 2608 bp, Rattus norvegicus
gaggcgagtccggtctcaaaatggaggtaaaaccgccgcccggtcgcccccagcctgactccggccgtcgccgccgccgccggggggaggagggccacgatccaaaggaaccagagcagctgaggaagctgtttattggtggtctgagctttgaaaccacagatgatagcttaagagaacattttgagaaatggggcacacttacagattgtgtggtaatgagagatcctcaaacaaaacgttccagaggctttggttttgtgacctactcttgtgtcgaagaggtggatgctgcaatgtgtgctcggccacacaaggttgatggacgtgtggtggaaccaaagagagctgtttctagagaggattctgtaaagcctggtgcccatttaacagtgaagaagatttttgttggtggtattaaagaggatacagaagaatataatctgagagactactttgaaaagtatggcaagattgaaaccatagaagttatggaagataggcagagtgggaaaaagagaggatttgcttttgtaacttttgatgatcatgacacagttgataaaattgttgttcagaaataccacactattaatgggcataattgtgaagtgaaaaaggccctttctaaacaagagatgcagtctgctggatcacagagaggtcgtggaggtggatctggcaactttatgggacgtggaggaaactttggtggcggcggaggaaactttgggcgtggaggaaactttggtggaagaggaggctatggtggtggaggtggtggcagcagaggcagttatggaggtggtgatggtggatataatggatttggaggtgatggtggcaactatggtggtggtcctggttacagtagtagaggaggttatggaggtggtggaccaggatatggaaaccaaggtggtggatatggtggtggaggaggaggatatgatggttacaatgaaggaggaaattttggtggaggtaactatggtggtggtgggaactataatgactttggaaattatagtggacagcaacaatctaattatggacccatgaaggggggcagttttggtggaagaagctcaggcagtccctatggtggtggctatggatctggaggtggaagtggtggatatggtagcagaaggttttaaaataaaacaaacggtgaatgagaaccctacctgcctaactgaggaatgtctttcccaccaccttaaatacgaaggtttctggctgggtaaggtttgtagctcacagtaaaaaccgatgaccgttggtttccctacaaattaatgggacagtttgagacattacccctcaagctcagttttatttggtaccccatagaacaagttctaagccttaggcagttataccatgccaagggtatttgtcatgagccagatgtgttctcttcatatgtacaacttgctgttccaagggaaaggcagctttccataacggaaagtcatgttggcttttcagaaagtaatttttggtgtatgactttataatgagctgctagtttccctagttccaccctaggaaagcaaggaactttcacaattgtcaaaatgtcttcctcaaagttctctagcttaaaagtttactattgcatggaccagcagggacagtcagtttagttatgtgtttttagtcttccccaaaacccatcacaccaacagtctggtctcactgttgtcctagcttggaactcagtccaccagccttctgtcacccaagtgctgggattaaagggtggtgcctatatgacaactcattcctttaaaaaaaaaaatccaaagaacggctgggttactattaaaatgtgttgctgattgtccaaaagggctatttctgctgccctgaaagggcttctttgaaaattgcttaattcaggttactttttaatagaatattttcaggggacaaatctgcaaaatgtttccttcacagggataccctgcattgcatcaacaagtttgtgtggcatttaagtcaggatgaattcacagaaataggtagcaatctttcagtggtggttacttaatagatttagaaaaataaatacgttatcttaaaaggcatttacagttcatttcctttctgaaataaaattattttacttaatatggttccactgtcatttctgcaaaaatcgttggtagcaacggtgaacaagaaaacaaacgaaggctgactttggttttgttggacttgtgggatactgcttccagtttatgtctgaaagctgtgttcacattcatgttgaaattagggaacacatggagaaaaagttctggtaggggactacagcgagttcaacttggtttttatgagttctgtcacgatttaaaacgcctgacaacggtacggtgattggcatggtagcaagcatgcagatatgcaaggtgctgtgaggatcggtagcctgtccaagtattcagttttgaagctaacatgttttcagatctttatgacagcagaggtggtctgtaattcaattgtttcatttgtagcataatgaaatgttacagaaagatgaccttttcattaaaatatttttagaaatgtgaaaaaaaaaaaaaaaaaaaaaaaa

SEQ ID NO: 870 - DNA, 3453 bp, Rattus norvegicus
gagcgattgggacctccccttttggattggtagctgagcggcagtggcggcggctgcgtgagagaggcgagcggcggagagcggtggcaaatactgaacgcagtctcgcagggtaagcccgaggcatcttcccggccggtcgggagcaggaggagcacgcagcggatcccaggcagaggcggaccgggccagccatgtcggtggttgggctagacgtgggctcgcagagctgctacattgcagtggcacgggccgggggcatcgagaccatcgccaacgagttcagcgaccgctgcaccccgtcagtcatatcatttggaccaaaaaacagaacaattggagttgcagccaaaaaccagcaaatcactcatgcaaacaatacggtgtctagctttaagagatttcatggcagagcattcaatgatcccttcattcaaaaggaaaaggaaaacttgagctatgatttggtcccaatgaagaatggtggtgttggaataaaggtcatgtacatggacgaagaccatctctttagcgtggagcagataacagccatgctgctgactaagttgaaggaaactgcggaaaacaacctcaagaagccggtgacagactgtgtcatctcggtcccgtccttcttcacagatgctgagaggaggtctgttctggatgccgcacagattgtgggcttgaactgcttgcggctcatgaatgacatgacggctgttgctttgaattatggaatttataagcaggatctcccgaatgcagacgagaaaccccgagtcgtggtgtttgtggacatgggacactcctctttccaagtgtctgcctgtgcttttaacaaagggaaactgaaggttctaggcacagcttttgatcccttcttgggaggaaagaactttgacgagaagctcgtagagcatttttgtgctgaatttaaaaccaagtacaaattagatgcaaaatccaaaattcgagccctccttcgtctccatcaggagtgtgaaaagttaaagaagctcatgagttctaacagcacagacctgccgctgaacattgagtgctttatgaatgacaaggacgtctctgcaaagatgaacaggtcacagtttgaagaactgtgtgctgagctcctacaaaaaatagaggtcccccttcacttgttgatggaacaaactcacctcaagactgaagaagtgagcgccattgagatagttggaggagccacaagaatcccagctgtgaaggaaagaattgccagattctttgggaaagacgtcagtaccacgctcaacgcagacgaggctgtggctagagggtgcgcactgcagtgtgcaattctttctccggcatttaaagttagagagttctccgtcaccgatgcagttcctttcccaatatctctggtctggaaccatgactcagaagaaactgaaggtgttcacgaggtgttcagtcggaaccatgctgctcctttctccaaagtgctcaccttcctgagaaggggaccctttgaactagaagctttctattctgaccctcaagcagttccatatccagaagcaaaaatcggccgttttgtcgttcagaatgtttctgcacagaaagatggagaaaaatctaaagtgaaagtcaaagtgcgtgtgaacacacatggcattttcaccatatccacggcatccatggtggaaaaagtcccgactgaggaggaggatgggtcctctgtcgaggcagacatggagtgtccaaaccagaaaccagcagaaagctcggatgtggataaaaatatccagcaagacaacagtgaagctggaacacagccccaggtacaaactgatggtcaacaaacctcacagtctcccccttcacctgaacttacctcagaagaaaacaaaatcccagatgctgacaaagcaaatgaaaagaaagttgatcagcctccagaagccaaaaaacctaaaataaaggtggtaaacgttgagctgcctgttgaagccaacttggtgtggcagctagggagggaccttctgaacatgtacatcgagacggagggcaagatgatcatgcaggacaagctggagaaggagaggaacgatgctaagaacgccgtggaggagtgtgtgtatgagttcagagacaagctgtgtggaccgtatgagaaatttatatgtgagcaggaacacgagaagtttctgaggcttctcacagagacagaagactggctgtatgaggaaggagaggaccaagccaagcaggcctatattgacaagttggaagaattgatgaaaatgggcactcctgtaaaagtcagatttcaagaagccgaggagcgaccgagagtgttggaggagctaggccagcgcctacagcactatgccaagatcgcagcagacttcagaggcaaggatgagaaatacaaccacatagatgaatctgaaatgaagaaggttgagaagtctgttaacgaggtgatggagtggatgaataatgtcatgaatgctcaggctaaacggagtctccatcaggaccctgttgtgcgcactcatgagatcagcgctaaggtcaaggaactgaacaatgtttgtgaacctgttgtaactcaacccaaaccaaaaattgagtcacctaaactggagagaactccaaatggcccaaatatggacaagaaagaagatctagaaggcaagagtaatctcggtgctgacgctccacatcagaacggtgaatgccaccctaatgagaagggctctgtcagcatggacctggactaggctctgccctggctccctcctccgactcatgaaatgtgtttgccattgtatgtgattctgtatgacagactgagtctatttatattttctttcttcctttttttttttttaaagactgtctagacattttgtgtattatgagggaaaaaagaaaaagcttgagtctgtagtctctgaccctaaatgagagtgactttggtgacaggctcctgtggagttgggaccccactgagctctgtacagtattgctgctcatatgctgaggagggaggtcgtttgtcttctgaggacgtgaactgcactgacagcgctgggctcagtctgcagcagctgttcttgccaaggggttttctgtgttcttctgcatttgctcttcatttccgcatgtgtggccggggttgttcataaatgagactgagtctgatctgcataagggctttccaaattaagtctgtccagtagagtgatttgctttattattaccaagaatacaacagctagtgaaccgtagcagcatgcgaagcagggctgtaactatcaccatacatgcactgtcccgtggaggtgtgacacgggagacgtgtggatcatgtgatcattgtgaacaccttgtgagctttaaaataaagtccaccctgtggtgtcatttctaaaaaaaaaaaaaaaaaaaaaaaaaaaaaaa

SEQ ID NO: 871 - DNA, 472 bp, Rattus norvegicus
aaggcaaggtctctgtcattagggctgggagagatggtacagatcaagccaaacagtgaaaaataaggcaaactgtagcttcgggttttgagcctggcaccaggaaggcctcttcttgaggaagagggggcaggcagtggcaaatcagcagacgagatgcaaatggagtaacaatcacagttagtggggtaacgagatcaggcggtaaacccttaaagcaacacccaaggtccacgtctttgcatgtgcagggcacaactccagcagcagtttctgggtttgggggtttgttacttttccgactttccccaccccctaaaagacacgaagacgagctcatgaagagatcaaggaagggacgtcttctggctgcgctgggcaagggttgggtgacttccgggagcacttgtctaccttccctgtggctggccgagtcctacaaacgtttgtaggtgcccaggagcgctttgca

SEQ ID NO: 872 - DNA, 592 bp, Rattus norvegicus
aaaatgaaaacacagaacatacttaattttttattttgaaattccctattccctctatacaagaacctttgctgaaacactttccacaaaggcagcagtgaattttcagaacattttacattttttccccctcagcaaaaaagataaatcacagtgtaaattatgttgttctgctgtcatctttggctggggttagacctagaagttggcgactagcaaaccatcatagagaaaaggtgccagtgcttcttaggcctttaagctacaaactcagcaaggaatgtttgcatttaatctctgtaaggtaccaccaggggggtatgacagcattaacttccataaacttttatagacaaatgggaaaaaaaatctacaaaattagctagtaatattacacagcaatacacactttttatactctacacaaaaccaaaattcttggtcttaatggcgagtagtaatttttgtttgagaatctgtttagaggaatagagtgggacataaagtcgagaaatacaagtatttgcagtaggaagatgttggtcatctggtggtcttattgtgaattgagggcataagctgaaaacctttt

SEQ ID NO: 873 - DNA, 1248 bp, Rattus norvegicus
atgttgctgctactggccctggtgagtgtggccttggctcatgcttccgaggagcactttgatggcaaccgggtgtaccgtgtcagtgtacatggtgaagatcacgtcaacttaattcaggagctagccaacaccaaagagattgatttctggaaaccagattctgctacacaagtgaagcctctcactacagttgactttcatgttaaagcagaagatgttgctgatgtggagaactttctggaggagaatgaagttcactatgaggtactgataagcaacgtgagaaatgctctggaatcccagtttgatagccacacccgtgcaagtggacacagctacaccaagtacaacaagtgggaaacgattgaggcgtggattcaacaagttgccactgataatccagaccttgtcactcagagcgtcattggaaccacatttgaaggacgtaacatgtatgtcctcaagattggcaaaactagaccgaataagcctgccatcttcatcgattgtggtttccatgcaagagagtggatttctcctgcattctgtcagtggtttgtgagagaggctgtccgtacctataatcaagagatccacatgaaacagcttctagatgaactggatttctatgttctgcctgtggtcaacattgatggctatgtctacacctggactaaggacagaatgtggagaaaaacccgctctactatggctggaagttcctgcttgggtgtaagacccaacaggaattttaatgctggctggtgtgaagtgggagcttctcggagtccctgctctgaaacttactgtggaccagccccagagtctgaaaaagagacaaaggccctggcagatttcatccgcaacaacctctccaccatcaaggcctacctgaccatccactcatactcacagatgatgctctacccttactcctatgactacaaactgcctgagaactatgaggaattgaatgccctggtgaaaggtgcggcaaaggagcttgccactctgcatggcaccaagtacacatatggcccaggagctacaacaatctatcctgctgctgggggatctgacgactggtcttatgatcagggaatcaaatattcatttacctttgaactccgggatacaggcttctttggctttctccttcctgagtctcagatccgccagacctgtgaggagacaatgcttgcagtcaagtacattgccaattatgtccgagaacatctatattag

SEQ ID NO: 874 - DNA, 558 bp, Rattus norvegicus
  misc_feature (1)..(558): n = a or c or g or t
ttntnnnnnnnaatcttttctggtttgtttagtgcagtggggtcctcaataatcatgattccgtgagggtggcacatgtggtcctttctactggggacatcactaattattatcttgctactggcagagtaagaaaaatcagggaagtggctgtatttctgatcgtcgtctgactcctttctactgtctttggggtcttccactttgatagccattacgttatccgactgtagctgttcaatgtctcttaagtccttgggctctctgatgttgccctttgctgacttcccgaattctgcttccgcctggaacgcagtttcaatggttttctccattttcatgtctcgctcttccttccccttttccatctcctcgattcgtcctccgtcggagtctttggacttggttagctctgtgccttccatttttacgccctctgacgccaggcacatctctgccagttgaaagagtgcagaatttccacagcgtttcacaggctcagtgccacccaactgcgaagtgcttgaagagatctcttgcaactgaaacaaagctgat

SEQ ID NO: 875 - DNA, 512 bp, Rattus norvegicus
ttggagctggggactgaacccagggcctacgcactcagatagagcgagactgctgataccaactgagctaaagttctcaacaccccccctcagtgctttttaaaggtttattttatttttattttatgtatacgggccggcatgtatgcaggtaccaagtgactgcaaggacttcagaggccagagaggacctcagcttccctggaactggagttactgatagttgtgagctgcggccatgtgggtgccgggaatcaaaaccaggtcttctgggagagcagccagtgctcttaaccactgagccaactctccagccctcacccccttaaaagaagttttcgctgtattttatgcgtatctgtgttttgcctgcatatatgtatgaggaccacatgtgtgtggtagttgcagagctcataatagagcgttgtagcccgtggtcttctgcagaggaacaagtactctgattgcctgggctgtcctccagccccgccactctgtaacgtgtaatg

SEQ ID NO: 876 - DNA, 429 bp, Rattus norvegicus
ttctgaagctgaggactgaacccagggccttgcacctaccactgagctaaatccccaaccccaacacatgcctaattgtatggctggtgaaaaataatcatcctttagaatgaacaatttcaaatatgagtttcataactaaagagtattctggaaataacccagtggtagtcacagaatagatgcacatatttaattgttgattggtttatgattgtcagctgtctaggcaataattaagtataaaataataaagttatatattaattttaaaatgaaggacagaggtacaatagttatctgtttcatatagtctgttaagttgaattagaaattggcagactcatgtgcaaacacctaggaattcaatttgatttttaggtcatctgagtccaaggcctactcagggggacagggggattgttcttt

SEQ ID NO: 877 - DNA, 480 bp, Rattus norvegicus
ttaacagcatttttactcaaagcaagaattttgctcttcactcttctctaggccttcaattgtctcttttcaagagccaacactcttactagaggttacatacactcagtcctgagcctctggtgctctgagttatgagctaggctggctctttccaagcactaagtgccaactgtgtctgaggcactgtgctgggacagggagatgagtgcactaaagacactgccttgctatcatttcagtccaggatggtggacaatcaaatacagggtaagccactggcatatgtgctattaacagccacactttttaaagtaacaggaaataggttaacgactttagtagatattgtatttagtacaacaaagctaaaatagcaatttaatatgtagtcaatatttttaaatgctagcttactttttcttctaatcaatcctaagctctcgccatataagttccatttacactcacattcagcac

SEQ ID NO: 878 - DNA, 1728 bp, Rattus norvegicus
tgactgtgcaccgccgcgtccgcccgcccgccagtatggccaccaccgccacctgcacccgcttcaccgacgactaccagcttttcgaggagctcggcaagggtgccttctcggtggtccggaggtgcgtgaagaaaacgtcgacgcaggagtatgcagcaaaaatcatcaataccaagaagttgtctgcccgagatcatcagaaactagaacgagaggcccggatatgccgacttctgaaacatccaaacatcgtgcgtctccatgacagtatttctgaagaagggtttcactacctcgtgtttgaccttgttacgggaggggagttgtttgaagacatcgtggccagagaatactacagcgaagctgatgccagccactgtatacatcagatcctggagagcgtcaaccacatccaccagcatgacatcgtccaccgggacctgaagcccgagaacttgctgctggcgagtaaatgcaagggtgctgcggtcaagctagctgattttggcctggccatcgaagtgcagggagagcagcaggcttggtttggttttgctggcaccccaggttacttgtcccctgaggtcttgaggaaagatccctatggaaaacctgtggatatctgggcctgcggggtcatcctgtatatcctcctggtgggctaccctcccttctgggatgaggatcagcacaagctctatcagcagatcaaagctggagcctacgatttcccatcaccagaatgggacacagtcactcctgaagctaagaacttgatcaaccagatgttgaccataaaccctgcaaagcgtatcacagctgaccaggctctcaagcacccatgggtctgtcaacggtcaacagtggcatccatgatgcatcgccaagagacagtggagtgcttacgcaagttcaacgcccggagaaaactgaagggtgccatcctcacaaccatgcttgtctccaggaacttttcagttggcaggcagagctccgcccccgcctcgcctgccgcgagcgccgccggcctggccgggcaagctgccaagagcctattgaacaagaagtcagatggcggcgtcaagaaaaggaagtcgagttccagcgtgcacctaatggagccacaaaccaccgtggtacataatgctacagatgggatcaagggctccacagagagctgcaacaccaccacagaagacgaagatctcaaagtgcgaaaacaggagatcattaagatcacagaacagctgatagaagccatcaacaatggggactttgaggcctacacgaagatttgtgacccaggcctcacttcctttgagccagaagcccttggtaacctcgtggaggggatggatttccataagttttactttgagaatctcctgtccaagaacagcaagcctatccacaccaccatcctaaacccacatgtccatgtcatcggcgaggacgcagcttgcatcgcctacatccggctcacccagtacatcgatgggcagggtcggcctcgcaccagtcagtcagaggagacccgggtgtggcaccgccgggatggcaagtggctcaatgtccactatcactgctcaggagcccctgctgcaccgctgcagtgagctcaggcacaggggcattaggagattccagctggaggctgaaccttcgaagtcagtgactctggagggcctgagtgacagccgcggtcctgtccatttgaggtttaaa

SEQ ID NO: 879 - DNA, 295 bp, Rattus norvegicus
ttcctgaaacagccgcgatattgaaacagtgtattatcgagggatgaaaacttgctaatgcaaaatctggaaacctgtgcatctctgccgcaatcagtttacattaactgtgcaaatttacgcctgttcataacatgattgggatccaactttaacagacaagcacaagtgccccggcttgtgccacatgaatatcaccgacatgaactaaggtgtgtttcataccatgcctccactttttaaaaataagacggttactgagtcaatcttagaaaactacaagcgaatgtacaga

SEQ ID NO: 880 - DNA, 491 bp, Rattus norvegicus
ttagagtataatttcaatttgctagttgttaagcagccataaaagagggaaatggttttaaaattttttattacttctatgtgagcaaagtagtttttgatgtgactctcaaggatttgaggaaatattaaaaatcatgatcagaaattgccagtagccagctcaatcataaaatcacacataaaagtctgttttcatgaaagtgagcttaagttcctcattaaaggaaagaattgaaaagacttcatttggaagttttatattagttcaatatttaatgtcctctctatcacctttgttctattttttcaatattgttatgttacatttaaagacataatgtcaggaagttctcttcagacaccctaggtccacttctgtttactccagtgagtttgtatcagtattttaaaaaaaaactagaaatgattggaaaacattgtcacagttgacaattttatttatttttaattttttgacttagtaaaaat

SEQ ID NO: 881 - DNA, 594 bp, Rattus norvegicus
ttacatggacagtttaagttttatttttggaagttacacatactttaaaagaacaatagttttttcttgttttccaatggatgttattactccttagaacactagatgaagacttcacttatgattgaaaccaaagctttctgaggccaaatcaatgtagtgtcttcagcaggagacgctcaggatctgagggctgcgtttctcattctgtagaagcacatttaaaactaccacaaaaccttaaaacatcgaaactcctgagctaattaaaattaatgcactggtctcacttcatttttatttatttgaaaaaaatgtatgtatgttaaaatagttttgatacaaatgagttatactgcttattgttggtggggaaaggttaaaacattaagtttcttctttctatggtcttagactagaatgcttttggatttttggcaactattgtattctaagaatacattctctttccccaccaaaacaaaactcaatttttattaataattatagaattatacttgctttgaaaaaaaatacttttcttaaaatactttctttttaaagtcataaaaatggattttaatttatttgctg

SEQ ID NO: 882 - DNA, 278 bp, Rattus norvegicus
ttgcaagctttctgagcttctgcattcagaccacacagaacatgtaaatatttatacacagaccggagaactagcacacgccttacagcctgtgtgtcccctgccttcctctctcttctctcttaagaagtgcggagtgtttttttttcttttttgcggatttgcctagaggtgccccaggcccccgctcctagagagggtgacctttctgtttctccttctccttgttctccagaggggcaatgtgagggtgatggagccgggtcccttctggtgcc

SEQ ID NO: 883 - DNA, 401 bp, Rattus norvegicus
ttaaaaaacagagtccactttaatactgaggtgctataaagtctcaaggtgtccatgcccactgcatgtgtgtggggacatgggctcccacgtacaggttcccgataggccagagccactgcgtccagcctaaaaatctcaggccctgctgtcctgggtctgcgatcgcacacagggcccgcatcttgctaggatgtgttaagcagtctgttttgaacatcctccagaacttgatgaaccagtccctcacgggacttcgtgccatctaaatagaccacttccactcggtcccgctccatctcccgtttatacttctggtacatgggccatacgtgaccatcaaagaggccaggaggatcagggaccatgtaagtacggcttcttctcctccgcttgcattc

SEQ ID NO: 884 - DNA, 358 bp, Rattus norvegicus
ttctcggaggtggggaccgaacccagggccttgcgcttcctaggtaagccctctaccactgagctaaatccctagcccccaaatcaaatttgttaatgaagttaactaatgctgctcttatcaatggcgtccaaattatgcctcagttccatgggcacagtggctctgaggggtgacatagaaaaatgctgtacatagagagctcattaccatttattgagtgcttgctgcaagcaagactctctgggagacctgacttcattatcttatttatccagatgcacagtgttctcttctaaaagaccatcaggttaaggaaacaggagtgacagggtcaactgtgggaagaacttggcac

SEQ ID NO: 885 - DNA, 589 bp, Rattus norvegicus
ttccagcattgtttatggctggtgaggtggtctgataagtacaggggcttactgagaaaacatggtgacctgggtcccatccccaaagcccatgaagaagaaaaccagctcccaaaagttgtcctctgacctgcacataataccatgcacatggctgcactcacttacacacgtacacacacacacgcagcagtaaagtttaatatatagactcattgtgtgtacatgtatgtgtatactgtgtgtgagagcactcacataccacagtatgtatgtggactgtaaaggacaaccccaggggacagtctgtacttcgaccttgttttcgaggcagggtctctttgttaagccactgctacacattaccccatgctagccagaccctgaggtccgtggtgggggtgtctcatgactgcacatccaggagtgccgggattagagacatgtaactttctgtctggctttttacatgtattctgaacagccgaactctggacatcaggcttgcatagcagacattttatccactaatccatctccttgtcctgagatctggttgcttctgtggtcattcacgcttgctgtttta

SEQ ID NO: 886 - DNA, 460 bp, Rattus norvegicus
ttacaacagaggatatagggcagaaaagagttagtcagagttggagatcagggggaattctgggaggatctagggccccatggacttctgccttctgcagcattatgagagcagacctgcccctcctgctgtgagcccaccagtgacagtggcttctgccccaaggccagtaggaagagtcgctcctgatgactgtgataggcccagtgacaggcagatgaccgtgataggcctggtgacactcggatgacaatgataggcccagtgacactcggataacagcgataggcccagtgacactcagatgtagttttgaaacctcttttcatttgtgaacttggtcatcaataattatgtcaccaagtttgtgactttgacacttggtactgagctgttacatgggggtattctgagggtttttatattccctctgacgattgttacttgaagaacagttgat

SEQ ID NO: 887 - DNA, 1448 bp, Rattus norvegicus
cggccgcggagccgccacccagaccctgtcgcgcgggaggcgggatccgcacgaaataagtcataatgagttacgcagaaaagcccgatgaaataaccaaagatgaatggatggaaaagctcaacaacttacatgttcagcgcgcagacatgaaccgactcatcatgaactacttagtcacagagggctttaaggaagcagcagagaaatttcggatggagtcagggatcgaaccaagtgtggacctagaaacactcgatgagcgaatcaagattcgggagatgattctgaagggtcagatccaggaggctattgccttgatcaacagcctccacccagagctcctagacacaaaccggtatctttacttccacctgcagcaacagcacctgatcgagcttatccgtcagcgagagacagaagcagctttggagtttgcccagacgcaactggcagagcagggtgaggaaagcagagaatgcctcacagaaatggagcgcacattggccttgctggccttcgatagccctgaggagtcgccctttggagacctcctccacatgatgcagaggcaaaaggtgtggagtgaagttaaccaggctgttctggattatgagaatcgagagtccacacccaagctggcaaaattactgaaactgctactttgggctcagaatgagctagaccagaagaaagtaaaatatcccaaaatgacagacctcagcaaaggtgtgattgaggagcccaagtagagcctgtccacggagccagcactgtcaatcagcacaggactcctcctctgtgactggcaggttgtcactgcagtagagaacctttccccctgtacttttctttggccccattgtttaaaaggggaaaatggcctttttaaacactggcaaacccgtgatggaagacaccacctctgccgtgccctggatcctgagggctgcacacacttcagttgactgtcctcgcgcttccggatcgctggttccagaagatgtggtttgccacctgtgctgcactgctgggagtgtcacctccgctgaaggcctcccacaggacagcacacaagaagtgctgaagtgctgaatgcttcgacacctgctagcgtgcaggcaggcaggcaggcaggcagggtcttatcttcctaggtctcaccagactttcatggttttccttaccccttcttttttttctttttcttcctccttttgttccttcataggaaagaatatataaatttgtaaatcttaattcaaagataactttggtgtgggtactgagtttggtttggttctttgcctttgccttttggtgtgggctgtgtggcttttgggaggaagggtgtgtgtgtgaaaggtgaggctgtgggtttgttttctcttttttttttttttaattttcaaaatatattttgggtgctgtaaaaaaacctcgtgccg

SEQ ID NO: 888 - DNA, 419 bp, Rattus norvegicus
ttactatggtcaaaggctgtatgtatttcagaaaaaaatcattttttcttattagcataattttctttaattacccccagtttcatagtagcattttattttatactttaaccttgcaagtcagtataaagtgatcctacatttcaagtcatatgacatgaaaacagaaatgtgaattcttttataaattagttttcatcttctgtaacatctaattcttcatcatcctcatcttctacatgttgatccttttttgttcgacaggtggctacctgtccagttccagatgtgcacttagttgacagtggtctctgaagaggtgactttgaatttgctcttacaatatctaaacgagatggataatctgatagatacagagaatttcggaaaacctctaagtcttcatcctcatcaatttt

SEQ ID NO: 889 - DNA, 330 bp, Rattus norvegicus
ttgctggttgcactcaggcatgagtgaaactatcccacgtttaatgtcagcaagaagaggacacagctggaacagggtggtgagggtgactggattttgaaatcaatcatttgttacgggatttaccacttttcccacgaagagggggcaattggtgtattcatctttaatgacaaataagaagggcctgttgaaatggattgaaaagttttgaggcgagtccctcttactccaactggtgttccttgtaggtactgtcacatcatcttcaaaggtcagtacagtcttgtgcacagccttgccgagcttcaggggagcatcctgtgtgac

SEQ ID NO: 890 - DNA, 508 bp, Rattus norvegicus
ttgcaaaccaaaacaatttcttttaatgagaataactaaaatccaaaacaaaatttcagaacatgggaatcagatgcaagtccaacaggcagatgaacagcatccacaactccaatttctgtagatatgaccaccttgtctgggttctgaatgcatcagtcatgtacagagttcaagacagaaaagtactcaaaaaatatacttgtgccttacattctaggttatcctggaagatatctatggtgaaagtattccatggcccctatatacttacaccctgagagccctgcttactccttccatgagccttgagttgaccttgaaggtctggatagaaccagatgctgctgaacgccttctccaaatgactgttccttgacatcctttgatggcgtctgttgataacattgacctaaaaagcaaagcagctctcactgtgactgcttagtcccacctcttttctcaaatatctttgtttgttgactacttggagatcggtataaatgca

SEQ ID NO: 891 - DNA, 346 bp, Rattus norvegicus
ttatttatttttttattttcaccatgggattaatatgatcccttttatttttttttgggagttttttacatgaacaatgcaccagggattgccccaaaagaggtggtcagaaaaaaaacgtgtaaaaagggccccaacattaacaaaaaggacgccctggggggaaaacgggcccaataagaaaaagccggcccccttttcccctgggccccgggggggggaaaaaacaaagaaaaccccttttcgggggggggggaaaacgctttttaaaaaaacgggcccctcttgggggaaaaaaaacccacagccccggtaaaagaacccaaactggcgggccttcaatttt

SEQ ID NO: 892 - DNA, 586 bp, Rattus norvegicus
ttaaaaatgaagcacatttaatcatttttaaatattctgtgagaaaaggttaacttttaaaatgaagcacattatgtatcccaaatagtgacaattacactgacatttaaaagtattatttatcacttaaaatgtccatttcagactatcttaaaatacatacaactgagtttctctagaagcacaaatatacttggaatacatactaattttagctcatgttacaatcaagagttttcactgatctacaagatagacaaaaataataaaatagaaatctgggatacatacaaggtaacagaaaagaccatttgttaattccgttgaagtgtcataaatctaccatttgagacacacttctatggactggctcccagtgtgaggagggaagcgtgaatcaggcacgctgcaatgggaaagcacagttaacacatcctagcatgagtaggccctctcttactgtgtctgcactgagggccaagcggctgccagtgtcagagcggaaagcacgtactacgagcctctgggtggaagaacgcatcattctctatgaagcaaccccgtgtacacaatggatcttgaatgc

SEQ ID NO: 893 - DNA, 360 bp, Rattus norvegicus
ttcattaaaaattttagcacatcttgatacatttacttatcagcttttaaactcttcctcctgctggcatttccttagtgtttacttgtttcacctctctggttcattggattgctactatttatgctttcatggactttatcttcacagtttgctagatcttgaaaagccttttccatgtcagcctggcccgctgtacttgctgtttttggcaaggtcatctgcagtgcacaccatagggtggtgcgtgctttgcgagtagctacacacatctccttaattgctgtagcaagagcaaaaacatctctgtcatcttggcacctaggtactccttgtctttgccgatttgaagcattaaca

SEQ ID NO: 894 - DNA, 494 bp, Rattus norvegicus
ttaaaatgaagtttaattttgtgtgtgtgtaaacgtggggacatgggtcaaggtcaaagcaccacatgtgcgaaggtcaaagaacaagtaatgggagttggctctctttggtcatcaggcttggcagcaaacgcctgtacctgttgagccatccatctctctggcttctattgaggttgtaaagttaatgaaccaaggtaaacaggtaggatttacagctttaaagaatatggaaattgaccaggtgatggtggcagcactggtcttttatcccaacattccagaggcagaggcaggcgggagtttgaggccagcctggtctatagatctagttccaggacagccagggttatacagagaaaccttgtgtcaaaaaaaaaaaaaacaaaataaaacctatacaaacaaggatatatcttatagctatatgccatttcagtgttcgagactttatggaattattcaggagtgaccgaggagtgctaatttattac

SEQ ID NO: 895 - DNA, 506 bp, Rattus norvegicus
ttggtgttttgttttgtttttaaataacttacatgcttttaaaaaactaattggaatttagtttactaggattttaacgttttgggtttttcctgctaactttaaacttcttgccagttctgggctggtttcagaaaaactgcatttcgtcatcatgataatttgcattttcctgcttctttacgtatgtagcgatttttgattaagagagccaacattgtaaatcttatctttttggctgctgggtatatttgtcttcctataaatattcttgagcttccccctggatgcagttcaatgacatgaaaacagtttgtttcttttgggtgttgtgtgtaagacttatttaggcagggccagagtagcatctatctagaggaatggctgctactgaggaattctactgggcaccctccagtgctgtgtgaatcaggtgatgatacagtctgacctgcaatagcaacttgtggaagcacatactgtcaccgcgactccattcagttgga

SEQ ID NO: 896 - DNA, 432 bp, Rattus norvegicus
ttgtacttagaagaaaaaaatcaaatagtaaccatacacttgaggaataaaatgttacacaaaaagactttcctcagtcttatttgtgagaggaaaatggaaacaattgtcctgtcaaatgatgacacattaaggtaaaacattgtagcatttttgtaaagaagaattcaatctggtaaaaggtgagaggcttgacaaccatacatttgtgccttggtttttgagaaggatttgctatagtctaggctggacagacaactcaatcctggatcactggagttatgaagtttgtgcctctgtgtttttctggtgctgagactcacatatgctctacacaaagctttacttcgataacattagttttaaaggctagaacatgaacaacataaatgctatgtttcccaacatttaaggaatatataaaaattactt

SEQ ID NO: 897 - DNA, 424 bp, Rattus norvegicus
ttagtttaaaataatagtatttcctgaaataagtttattcaaggcatatataatgattaaatgctttttgatttaataaatgctaaagaaaatctaaaatatattacactgcttagaaaaatagcaattaagactgagaggtcattcttatgctctttgaagtacattaataagggtgtgtgcgtacatgcgtgtgtgcgtgcctgtgtgtgtatgtgttgcatggctccagaaacaccacagaatggtagagtgaatatgttacaggtgctcctgattgggcctgaaatacagtctaccaccagttactaaatgtttgctaggaaggtggggcggctccctaatcatccctggaaatgcataatccaaagttggccgaaaaggcaatgctggaacgagtccaggcgttaggtaaggcgacata

SEQ ID NO: 898 - DNA, 7986 bp, Rattus norvegicus
gaggggaccaagccaattctcctttgcagcaaaaaaaagagaaaaaagaaaaaaaagaaaaatttacatgtatatattactaagataatatatacatctgattttattttttacaaaaagtttattttgctccatttttcaaaaaaagaaggagcgtgggtggcaggcggtttttataaattattcttatttttgattatttgtctctgtccttccccaccccctgctgaagcgaaaataagggcagggaccgcgggctcctacctatcagtaacctcccatacccgttcctccccctccctaacgctgagcatagtgccctgcacacagtaggcgctcaataaatgttcgtggatgatgatgatgatgatgatgaaaaaaatgcagcatcaacggcagcagcaagaggaccacgcgaacgaggcaaactatgcaagaggcaccagactccctatttctggtgaaggaccaacttctcagccgaacagctccaagcaaaccgtcctgtcttggcaagctgcaattgatgctgctagacaggccaaggccgcccagaccatgagcacgtctgcacccccacctgtaggatctctctcccaaagaaaacgtcagcaatacgccaagagcaaaaaacagggtaactcgtctaacagccgacctgcccgtgccctcttctgtttatccctcaataaccccatccgaagagcctgcattagtatagtggattggaaaccatttgacatatttatattattggctatttttgccaattgtgtggccttagctatttacatcccgttccctgaagatgattctaattcaacaaatcataacttggaaaaagtagaatatgccttcctgattatttttacagtggagacatttctgaagattatagcgtccggactgctgctgcatcctaatgcttccgttaggaacggatggaacttactggattttgttatagtaatagtaggattgtttagtgtaattttggaacaattaaccaaagaaacagaaggcgggaaccactctagtggcaaatcaggaggctttgatgtcaaagccctccgtgccttccgagtgttaagaccgcttcgacttgtatcaggagtgcccagtttacaagttgttctgaactccattataaaagccatggtccccctcctccacatagcccttttggtgttattcgtaattatcatctatgcgattatagggttggaactttttattggaaaaatgcacaaaacctgtttttttgctgactcagatatagtagctgaagaggacccagctccatgcgcgttctcagggaatggacgccagtgtgccgccaatggcacggaatgtaggagcggctgggtcggccccaatggaggcatcactaattttgacaactttgcctttgccatgctcactgtgttccagtgcatcaccatggagggctggacagatgtgctctactgggttaatgatgcgataggatgggagtggccatgggtgtattttgttagtctgatcatccttggctcatttttcgtccttaacctggttcttggtgtccttagtggagaattctcaaaggaaagagagaaggctaaagcacgtggagatttccagaagcttcgggagaagcagcagctggaagaggatctcaagggctacttggactggatcacccaggcagaagacatagatcctgagaatgaagaggagggtggagaggagggcaaacgaaacactagcatgcccaccagtgagaccgaatctgtgaacacagagaacgtaagtggtgaaggcgagacccagggatgctgtggaagtctctggtgctggtggaaaagaagaggcgcggccaagactgggccctctgggtgtcggcggtggggccaagccatctcgaaatccaagctcagatcgcacggggcccgcgaggctttgtgtgtgtgccggtgcagccttgaatctctcgtgaaactatggacgtctaggttctcagcccacttgcaggctgcatatgtcagaccctacagccgtcggtggcgtcgctggaaccggttcaatcgcaggagatgcagggcagctgtgaagtctgtcacgttttactggctggtgatcgttctggtgtttctcaacactctgacgatttcctctgagcactacaatcagccagactggctgacgcagattcaagatatagcgaacaaagtgctcttggctttgttcacctgtgagatgctggtgaagatgtacagcctgggcctccaggcctacttcgtctctctcttcaaccgcttcgattgctttgtggtgtgtgggggaatcaccgaaaccatcctggtggaactggagctcatgtctcccctgggcgtctctgtgttccggtgtgtacgtctcctgaggatcttcaaagtgaccaggcactggacttccctgagcaacttggtggcgtccctgttaaactccatgaagtccatcgcctctctgctgttgctgctcttcctcttcatcatcatcttctccctgctggggatgcagctgttcggagggaagttcaatttcgatgagacacagaccaagcgaagcaccttcgacaacttcccacaggcgctcctgactgtgttccagatcctgacgggcgaagactggaatgcggtgatgtatgacggcatcatggcctacggaggcccgtcctcctctggaatgattgtctgtatttacttcatcatccttttcatctgtggtaactatatcctgctgaagctcttcttggccattgctgtagacaatttggctgatgctgaaagtctgaacactgctcagaaagaggaagccgaagaaaaagaaaggaaaaaaattgccagaaaagaaagcctagaaaacaaaaaaaacaacaaaccagaggtcaaccagatagccaacagtgacaacaaggttactattgatgactatcaagaggaggctgaagataaggacccttatccaccctgcgatgtgccagtaggtgaagaggaagaggaggaggaagaggacgagcctgaggttcctgctggtccccgtcctcgaagaatctcagagttgaacatgaaggagaaaattgcgcccatccccgaaggaagcgcattcttcattcttagcaagaccaacccgatccgtgtgggttgccacaaactcatcaaccaccacatcttcaccaacctcatcctggtcttcatcatgctgagcagcgctgccctggccgcagaggatcccatccgcagccactccttccgcaacactatactgggctactttgactatgctttcacagccatctttacggttgaaatcctgttaaagatgacaacttttggagcgttcttgcacaaaggggctttctgtaggaactacttcaatttgctggacatgctggtcgttggggtgtctctggtgtcatttgggattcaatccagtgccatctcggttgtgaagattctgagggtcttaagggtcttgaggcctctcagagcaatcaacagagcaaaaggacttaagcacgtggtccagtgtgtctttgtggccatccgaaccatcggcaacatcatgatcgtcacgaccctgctccagttcatgtttgcttgcattggggtccagctgttcaaggggaagttctaccgttgcacagatgaggccaaaagtaaccccgaggagtgcagggggcttttcatcctttataaggacggcgatgtcgacagtcccgtggtccgtgagaggatctggcaaaacagtgatttcaatttcgacaatgtcctttcggctatgatggcgctcttcacggtctcgacttttgagggctggcccgcgttgctgtacaaagctatcgactcaaacggagagaacgttggtcctgtctacaactaccgtgtggagatctccatcttcttcattatctacatcatcatcgtggccttcttcatgatgaatatcttcgtgggcttcgtcatcgtcaccttccaggagcagggagaaaaggagtataagaactgtgagctggacaaaaatcagcgtcagtgtgtggaatatgccttgaaggcccgccccttaaggagatacatccccaaaaacccataccagtacaagttctggtacgtggtgaactcctcgcctttcgaatatatgatgtttgtcctcatcatgctcaacacgctctgcctggccatgcagcactatgagcaatccaagatgttcaatgacgccatggacattctgaacatggtcttcacgggggtcttcaccgttgagatggttttgaaagtcatcgcatttaagcccaaggggtattttagtgacgcctggaacacgtttgactccctcatcgtaatcggcagcattatagacgtggcactcagcgaagctgacaactctgaagagagcaatagaatctccatcacctttttccgtcttttccgagtgatgcggttggtgaagcttctcagcagaggggaaggcatccggactctgctatggaccttcattaagtccttccaggcactcccatatgtcgccctcctcattgccatgctcttcttcatctacgccgtcattggcatgcagatgtttgggaaggttgccatgagagataacaaccagatcaataggaacaacaacttccagacgtttccccaggcagtgctgctgctcttcaggtgtgcaacaggggaggcctggcaggagatcatgctcgcctgcctccctgggaagctgtgtgacccggactcagattacaacccaggagaggaatatacttgtgggagcaactttgccattgtctacttcatcagcttttacatgctctgtgcgttcctgatcatcaacctcttcgtggctgtcatcatggacaattttgactatctgacgagggactggtctattctggggcctcaccacttggacgaattcaaaagaatatggtctgaatatgaccccgaggcaaagggaaggataaaacaccttgatgtggtcactttgctccgacgtatccagcctcccctgggatttggaaagttgtgtccacaccgagtggcgtgtaagagattggtcgccatgaacatgcctctcaacagtgatgggacagtcatgttcaatgcaactctgtttgctttggtacggacggctctcaagatcaagactgaaggcaacctggagcaagctaatgaagagctccgcgctgtgataaagaaaatctggaagaagacaagcatgaagctacttgaccaagttgtccctccagctggtgatgatgaggtaaccgtggggaagttctatgccactttcctgatacaggactactttaggaaattcaagaagcggaaagagcaaggcctggtggggaaataccctgcgaagaacaccacgatcgccctacaggcgggattaaggaccctgcatgacattgggccagaaatccgacgggctatatcctgtgacttgcaagatgacgaaccagaagactccaaaccagaagaggaagatgtattcaaaagaaatggtgccctgcttggaaactatgtcaatcatgttaatagtgataggagagagtcccttcagcagaccaataccacccaccgtcccctgcatgtccaaaggccttcaattccacctgcaagtgatactgagaaaccgctgtttcctccagcaggaaattcggtgtgtcataaccatcataaccataattccatagggaagcaagttcccacctccacaaatgccaatctcaataacgccaatatgtccaaagctgcccacggaaagcggcccagcattggggaccttgagcatgtgtctgaaaacggccattactcctacaagcacgaccgagagcttcaaagaaggtccagtattaaaagaacccgctattatgaaacttacattaggtctgagtcaggagacgagcagcttccaaccattttccgtgaagaccctgagatacacggctacttccgagacccccgctgcttcggggagcaggaatatttcagtagcgaggagtgctgtgaggatgacagttctcccacctggagcaggcaaaactacagctattacaacaggtacccaggcagctccatggactttgagaggccccgaggctaccatcacccccaaggtttcttagaagatgacgactctcccattggctatgactcacggagatctccaagaagacgccttctacctcctaccccaccatcccatcggaggtcctccttcaactttgagtgtctgcgcaggcaaaacagccaagatgacgtccttccgtcgcctgccctgcctcaccgcgctgccctgcccctgcaccttatgcagcagcagatcatggccgttgcaggcctagattccagtaaagcccagaagtactcgccgagccactctacccggtcatgggccacccctccagcaacccctccgtaccgagactggaccccatgctacacccctttgatccaggtggatcgctcagagtctatggaccaggtcaatggcagcctgccgtcgctacaccgcagttcctggtatacagatgaacccgacatctcctataggactttcacaccggccagcctgaccgtccccagcagcttccggaacaaaaacagcgacaagcagaggagtgcagacagcctggtggaagcagtcctgatatccgaaggcttgggacgctacgcaagggacccaaaatttgtctcagcaacaaaacatgagatcgccgatgcctgtgacctaaccatagacgagatggagagcgcggccagcaccctgctcaatggaagcgtgtgtcctcgagccaacggggacatgggccccatctcacaccgccaggactatgagctccaggactttggtcctggctacagtgacgaggaaccagaccctgggcgagaggaagaggacctggcagatgaaatgatttgcatcaccaccttgtagcccagcgagagcaggcttggctccagcctgggatgggcacaggagggccagggataaagtgccacataattaggaaagtttaggcactagttgggaggaaaatgctcaattagacttttgtacgagtgatttcacgcctcaaggaagccataaacctggtaggagcaggttctcagcggccaggcatgtgcgtacgcatgccacatgctcgggcccagccccagaagacagaatgtctggccccaccgagaggatgggcgagagcagcagcctggcctgcacagagaccaggactgcccaggagtccatgtctgccacccagggctcatgcccacgcccctttgcctgcagacacgagagaggtcaaaggtgatgacagtcaccatgcctgtgtcgttacctcaaccatcggtctagcatatcagacgctcgctgggcccggcatatccgtgtctgagcccccctcccccagagcactggttcctggtttctgtgcagccgttctgagtggcgcacaccagaacccagccgctagtggtcgcgatgaggggagtgggaccggaaccgttttgttaagcgatgccagtttacataaagagaacatcactcagacggtcagttctgtcacattaagggcaattgtaaactggaagggtagcgcacttgcaaaccaggtaaaacttagatacattagtttgtttaaaaattatagatttactgtacatgacttgtaatatacgatttgtatttgtaaagagatggtctatattttgtaattatcgtaccgtatttgaactgcagcaatatcccacgggtcctaacaatcgtagtttcccaccaaaacctagaaattattagtatttttactcgggctaaacagaactaggagaattagaggcaattctcacatattcagtaaaaagaatcttttggggataaacttttgagttcataagaacttgacacttcagaactttttctaaagtattttgagttactataaacctatctttacataag

SEQ ID NO: 899 - DNA, 556 bp, Rattus norvegicus
ttggttttttgagacgaggttatctctacacagccctggctgtcctggaactcactaactaagctggccttaaactcagacatacactggcctctgcctcagtgctgggattaaagatgtgctaccatatcctgctcaaaacactgggtcttaccactcttacagtcttcacaacaagagtcaaaaagagtcagtctgtctctgtctctctcctcactgagtaacagagatggatgaacctaccaggcagcccatgctagctgggttggctgaaagcttgtaccaatgctcctgcctcctgagtgtcgggattatacgcatgagtcgatcacagctgcctggtttagtcccacttttacaaatgctattcagaaagtaagcttgcccaagatctcctggctcgttactgtacttcccaggttggtcctagaacaaagctaacacgccaaaccctaagagtttcccagcatcggcctcactcagtgttcttccactggacctctatcattaggcgaaagtaaaaatctacacacactgaattccgggctgagataac

SEQ ID NO: 900 - DNA, 1326 bp, Rattus norvegicus
cgagggcggggccgtgtggaggaggaagcgggccaggccgggcggcggctcaccagggcgaaccatggacagccagggcaggaaggtggtggtgtgcgacaacggcactgggtttgtgaagtgtggatatgcaggctctaactttccagaacacatcttcccagctttggttggaagacctattatcagatcaaccaccaaagtgggaaacattgaaatcaaggatctcatggttggcgatgaggcaagtgagctgcgctccatgttggaggtgaactacccgatggagaacggcatcgtgcgcaactgggacgacatgaagcacctgtgggactacacattcgggccagagaagctcaatatagacaccaggagctgcaagatcttacttacagaacccccaatgaatccaaccaagaacagagagaagattgtcgaggtaatgtttgaaacttaccagttttctggtgtgtatgtagccatccaagcagttctgactttgtatgctcaaggtttactgactggtgtggtagtggactctggagatggtgtcactcacatttgcccagtatatgaaggcttttccctccctcaccttacaaggaggctggatattgctgggagggatattaccaggtatcttatcaagctgctgctgttgcgaggatatgccttcaaccattctgctgactttgagacagttcgcatgattaaagaaaaactttgttatgtgggttacaatattgagcaagagcagaagctggccttagagaccacagtgctagttgagtcatacactcttccagatggacgtattattaaggttggaggagaaagatttgaagcaccagaagctttatttcagcctcatttgatcaatgttgagggggttggtgttgctgaattgctttttaacacaatccaggcagccgacattgataccagatctgaattttataagcacattgtgctttctggaggttctaccatgtatcctggcctgccatcgaggttggaacgagagcttaaacagctttacctagaacgagttctgaaaggagatgtggagaaactttcgaaatttaagatccgcattgaagacccgcctcgcaggaagcacatggtgttcttgggtggcgcagtcctagcagacatcatgaaagacaaagacaacttctggatgaccagacaagagtaccaagaaaagggtgtccgtgtgctggagaaactcggtgtgactgttcgataaaatagcaggcttgtccccatcacgcctctaatgctttttctttttcccttttaaaaaaaaaaaaaaaaaaaaaaaaa

SEQ ID NO: 901 - DNA, 559 bp, Rattus norvegicus
  misc_feature (1)..(559): n = a or c or g or t
ttctttctctctttctttctcttaaccttttaacatagttgttttgccagcaatgggtcctgtaattcaagtgaaaatggaaattcatgtttttgttcgttcctttgtgtgtatgcagggttggatggattctggggattggactagaagccttgtttgtacacgccaggcaagtgctttaccactgagccagcagctcctggcctctctcgtttttaggtttcttataaaagcgtgtttatctctagagaacatcggcaacaatgaagagaaaagaaagtgtgtctatgtcctaagaagtgattcagatcaattaactgagaggcttcccgaccccgcctgtattttatagtctctgccaacaaggctgctatctgggccccagctcccatcttgtgctctgtttattttggcttcccagagattaggtctcagtcaccaagctttctatgaccttctgttgttttcccttgcttattttacatgtgcctggttccaaagagcctggccaggaggtgtgtttccctgtgggaaggttttggactatggngctggccat

SEQ ID NO: 902 - DNA, 350 bp, Rattus norvegicus
ttaatgggttattttatttatttacatttcaaatgttgtcccccttaccagtttcccctccacaaactccctatcccctcctgttgcaggagtccaatattacatacccacagttttccagagaaggcacggaggttcaaaaagtttaaaataacattgggctgagtaaaatgtaggttccagtttctttccctggggttatgataaagtatcctgacaagagcaacctactgaaggatttattttggctcacagttcacgtgtacagtagaacattatggtggggaaaaggtggcagcaggagcttgagatatctgggcttgctgtttttgcagccaagaagtggaaaa

SEQ ID NO: 903 - DNA, 1232 bp, Rattus norvegicus
cgctttgcctcccggcattcggcagttccgctgcccgttggtgcgatcatctgggccgtatccgcaatggaagcggcacgagatgcccagcacagtgatgttctagaatctaaaggttgcttggccagtaggacgtcctctcatcaaaacagaagggccagcctctcttctgatggaactggtctgagggtcactgatgccccaggcctccccagggtgatgactccctctgacactgcttcggggctgggtcagaagacctcctccacttcatcctcctcctcttcatcctcctcctcctctccctcctcctcctcctctgcccaggctaatcggtccttgaaagtctcactgcctgaaatccagaaggaaaaatatcccgaggaattcagcctgctcaagtcacagacaacagatgggcagcgtcctgagtggacattttatccaaggttcagcagcaacatccacacctaccatgttggaaagcagtgtttcttcaatggggtcttccggggcaacaggaagtctgtggcagagaggacagtggacaagagccttgggaagaagaaatacgatattgatcccagaaatggaatccccaaattgacaccaggagataatccatacatgttcccagaacagagtaaagagttcttcaaagctggggcaactctgccgccagtgaacttctcactgggaccttatgagaaaaaattcgacacctttatcccacttgagccacttccacaaattcccaatctgcctttctgggagaaggaaaaagccaataatttgaagaacgagataaaagaagttgaggatcttgacaactggcaggcgccgatgcccttcctccacggttttctctccactgctaatcgaacaataactacctgtgatcagaaagtctagaaatctagtagttgttcagtcccacaaggctgcatgtttcatctggtcttcagtatatgctgcaatccagaagtgggctctaaagtcagaaggaatggatgtgctagcaaggtgaaggcaaacaaagaacaaaagcttccttcttcttatatagacgtccagctgaaggtgtggctcatattaaaggtatgtttttcctgactcaagatttggatcaaagactgtcttccacctcaagattcaaatgaaaggtctgtcttcccacctcaagattcggattaaagttgtgtcttcctacctcaaaaaaaaaaaaaaaaaaa

SEQ ID NO: 904 - DNA, 285 bp, Rattus norvegicus
ttataaaaaaaaaaaacactaaatgggggggggacaaaaaaataaggcaggtcaattatttataaggggggagggtgattttcactaaacaaacacgtgtgaggaggaaaatattaacttcaatcaaaaagaaaggaccaaatctttttccctccatgaaagataactatagaggtgtggataataaagacctacaaacccctccctgatcaaaggaacaattacaaagaccaaactatttaaaaaaaggggggaagaccaaaaaaaatgaaatgggtgggggat

SEQ ID NO: 905 - DNA, 343 bp, Rattus norvegicus
ttaatggggaaataatggacctttaattgattactaaataaaacctattgcctgtaagttttaaaatttttttattttttaatgactaacttttggcaaatggaccctcccctggattttgctcgttaaatccagttggtggttttgaacaattcgggatgccagtaatttttgaagccccatggaactttttgccagcctgcccaaatcttgtttgttggaccttgggtttgaggacctgaaaaatggggcggactacagtttgatgctgtaggaaatccgatttcagtttcagtgtcttgggaaagtgcaaaagcaaggcaaaaggtcttatccaggtaag

SEQ ID NO: 906 - DNA, 377 bp, Rattus norvegicus
ttggttctttttttttggagctggggatcgaacccagggccttgtgcttcctaggcaaccgctctaccactgagctaaatccccaaccccatgtttaaagttttgatgaagccggtcgttgtctgtcctagtgaagggagagatgcagggctgggcaacatgagcgacttttgtctctgaaaggagccagcactaatgaaccattagtcattgtcacttaaagaaagggtttctatactgttccgcgggggcactaagggacttgagccaggctgtgagccatcaggaacacctctgctttgagggtccacatctgaggggtcacagtccagaggccacaaggatgccagataaaggaacagggaaaagccaccaca

SEQ ID NO: 907 - DNA, 513 bp, Rattus norvegicus
ttaaagtttttactaaatgtttattttatgttcaagataaagcctatacacaattgaatgtggaaataaataactagaaatgctctggaaactctatttgcccttcaaattcatttttttaaggtcatgaatttttatttaaatcaatatgccaaatataaacactaagaaaagaagaactacatcttagtacagaaacgtaatcttctctgactaagggtttagctggcattatgataacgaaaacacacaagatacaacactttagcaggctgactcagacggctctgctggagaagaaaaaggcacagactgaaggacaatggtgaagagcagaggacatgggctcagtcacctgacacagagaactcagtcaggacaagtgaacacaatcagtgctaaatgacttctttaaattaagatgtataaacataggctataaaggcattacttttggaagcatctttgcatatttcttctatatataaatctttgtatacaatttccatgttc

SEQ ID NO: 908 - DNA, 476 bp, Rattus norvegicus
ttatttttttctattttattgatttatttttgcgcggggcccacaaacgcaaaaaaaaaggcacacccccagggggggggtgaaaaaactgtgttccccctttaacggaaaaaaaggggggcaaaaaaaaagaattcaaagtggttacatggacttcggtcccggtgcacgatcctgggtcccccgaccgaaaaaaacatccaaagccctggcataggcgaagacctccctgggtcctaaaaattggccccaaaaaaagccccaaattttcaaaaaagcggggggggtaaaaaaaaaaaaccgcggggaatggccccaaccccctttaaaaaaaaaggaaccgcacaaagggggaaaccaaattttaaaaccccggcgagctccacccaggtgttaccggaccccgatacataccttttaaagaatggggcacgggacacaggggtatgataaaaaggggggggggcccccaaaaa

SEQ ID NO: 909 - DNA, 413 bp, Rattus norvegicus
ttaatgaattcatacagcttgctttttaacaattctgcagagcccaggacatgtatataaatttactcttacataaatatatgaagatacaatctattacatcaattaggaatgtgctttcagattatccccaacacagtaaagacaaaaatagaaagctcaagagactgacattttacaagtaatataaatcaattctatttacttggtttaaactttacagaaaacagaaaaggacttgctcaaatctcaaacccaccactgtcagcttacctttctgaaagctagcctccctcctacaatcaaaaaaagcatccctctacaatgcataagagctcctgtttacagaaaacaccactgagatgcccaacagtagtacattttaggggagagaagtcacagaccacataaaa

SEQ ID NO: 910 - DNA, 224 bp, Rattus norvegicus
ttaatgttgcaaagacccgaatgatgttggataattgtgggaaaagtaaatccgtctcaggatcactgtcactgctgttgccactagtgattcttaggaaaacacagtcgacttttccaacaaaatgtatgatactatatgctcgatattagaacagtgagcccatgaatgattctatgaagctatgcatcatagacctcttgagctgtgaattagcactattt

SEQ ID NO: 911 - DNA, 1389 bp, Rattus norvegicus
ctgcctcatgtgtcccttccagaggtcttgggagaaaccgaccctcgcactggcttcctttgctgcatctctggaggttacggtgcaatctttggagcctgtgtgagccctgcgatagctgagttagaggtcggcttctgctggaaactaagtgagacattaagagatgactccaacagaggcgcggtggaattcagagtccccctgatctgagtcttggaggcctcatcctgctccatataattagaggaaatgagctcactggtacagaggagattgcggatttcagtccggaccttcaggcttcactcctcggcctgcagtatacgtctctccctaaccctccaggaagctgtgcccctgaagcccataggccccacagaccccacctgagatgtcttcttttgcttgctggaacctgtctctaacccttcttgtcctgttctgcagcccagggtctggtgaaaaggcctttgaagtctacatacggtccgagaagcagatagtaaaagccacagaggcttggagagtcaactgcagcaccagctgtgcagccccagagatcggtggtctggagacccctacgaataagttaatgttggaagaggaccctcatgggaaatggatagaattcctagtctcaaacgccactgtcgacacggtcttactttgccatttcacttgttcgggaaagcagcaggcagagagtttcaacatcagggtgtatgagcctccagctcaggtaacactgaaactgcagccccctcgagtgtttatgggtgaagccttcaccattgaatgcaaggtgccctctgtgaagccccttgagagcctcaccctctctctgctctgtggcagagagaccctgaagaaccagacatttgggggagctgaaactgtcccagaagaggtcatagccatattcaacagcacagctctgaaaaaggatggtcttaacttttcctgccaggctgagctggatctacgaccccacggtgggtctctctaccgccgcatctcagagtaccagagccttgaagtctatgaaataaggcaagacaaccagatggtcatcatcattgtagtggtgtcaatacttctgttcttattcgtgacatccgtcctgctttgctttatcctcggccagcactggcacaggaggcggacaggtacctacggggtgctagctgcctggaggaggctcccccgagccctccggggacgctgacaggcgcctgggagttcccagaactcaacatggcgccttcaaggtgtggttcagcgctggctgaaggactgtggcagcagcagaagatttgggggacatttccttttttagcctcaatacaaatacctggatttcaaaaaaaaaaaaaaaaaaaaaaaaaa

SEQ ID NO: 912 - DNA, 379 bp, Rattus norvegicus
  misc_feature (1)..(379): n = a or c or g or t
ttctaagaacagacacaagccagatttactggcacatgcctgtaatatgggcactttggaggtagagacaaaaagatcagaagttgggggctatcctgagctacttagagagtttaaggtgcctgagctacaagaaaccctaagtcaaagaaactgggggtaggtgaaagatggcttatcaagtaaaggtactcagtcctaaatctggcaacctgagttcaaatcccagaatgcataaggtagaaatcaagaactgacctctacacatgcaccatgatgtgcaagagcacatnagacacacacacacacacacacacacacacacacacacacacacacattaaaattaaaagtttttaaattcgtcaaaaggtaagtc

SEQ ID NO: 913 - DNA, 341 bp, Rattus norvegicus
ttgtttgtttgttttttgcatgatgtgtacttattatagagctctgtcatgggaagacccagtacaaacttctgaaaacaggccatgtagctcagtagctagaaagaagtgaccatcatgggaagcctgcacatgtcctgtacttttctagtctctagaaatttataatggggctatccaaggtgtgtcttttagtgatagaagatcatcttatcttctcggttgctgctaagatctggctaatgcattctattgtacgggggaattctatttcattagtgtggtaagtctcattcgagagaaagactataaccattttcccactcatgtctaattatttg

SEQ ID NO: 914 - DNA, 2540 bp, Rattus norvegicus
ggcagccggtgtgtcaagtcctctcaccgccttaggcggtgtctacggtgtgcgcctctcgtcggccggtggctccacagtcctcgcctcagcctcccttctcggtctgcgcggctgtcccaggctccgcgagccaccccggaccttgcgcccgcgagctctctcggcgcccgacggggccacctcgggctatggtgccgtccctggaggagcccgccgccgccgagcgggagacgaacgaggcgcagccgccggggcccgcgccctcggatgacgctccgctgcccgtcccgggaccgtcggatgtctccgacgggtccgtagagaaagtggaggtggagctgacgaggtcaacgggcaaccaggagccccccgagccccccgagggcggctggggctggctggtgatgctggcggccatgtggtgcaatgggtctgtgtttggcatccagaacgcctacggggtgctcttcgtgtccatgctggagaccttcggggccaaggacgatgacaacatggccttcaaggcagcatgggtaggctcgctgtccatgggcatgatcttcttctgctgccccatagtgagtgtcttcacagacatgtttggttgccggagaacagctgtcctgggtgcagctgtaggattcgttggactcatgtccagttcttttgtaagctccatcgagcccctctacttcacctatggagtcgtatttgcctgcggctgctcctttgcctaccagccgtcactggtcattctgggacactacttcaagaagcgcctgggactagtcaacggcatcgtcacggctggcagcagcgtcttcacaatcttgctccctttgctgttagggaatctgacctccaccgtgggcctctgctacacactgcgaattctctgcatcttcatgttcgttctctttctggctggcttcacttaccgacctctcgttcccagcagcaaagagaaagagagtgaggacagcagaagttccttcttctccaggagaaagcttagtcctccaaaaaaaatcttcaactttgccctcttcaaggagaccgcctatgccgtgtgggctgctgggataccacttgctctctttggatactttgtgccttatgttcacttgatgaaccatgtaaaggaaaggtttaaagatgtgaacaacaaggaggtgctcttcatgtgcattggcgtcacttcaggggttggacggcttctcttcggccgcattgcagactatttgcctggtgtgaaaaaggtctacctgcaggtcctctccttcttcttcatcggcctgacgtccatgatgattcccctgtgcagcgttttcggagccctcattgccctctgcctcatcatgggtctcttcgacgggtgcttcatctccatcatggcgcccattgcctttgaattagttggtcctcaggatgcttcccaggccattgggtttctccttggattcatgtccatccccatgactgttggtcctcctgttgcagggttgctccatgacaaactgggctcctatgatttggccttctacctcgctgggatccctcccttcattggaggtgctgtgctctgcttaatcccgtggattcatagcaagaagcagagagagatcagtaaaaacaccggaggggagaagatggagaaaatgctggcgaaccagagctctctcctgtcaagttcatctggaatcttcaaaaaggaatccgactcaattatttaatgccatatatacctccacctgactggatttgcttttgaattttaagccagttttccttttatatgaattgcagatttcttatttttttaaatcatccttggaatagcacaaatgggacatgaaacctttattactacaagaaccattttctctccccaaatagcttttgatatttccaggaatcggggggtaagagactgttgttacaggcaagcatgtttggaactcaaacttgagcattcaaagctatcagtaaggagcagccctggcagccttgggtgctgtgggctgcagcgtgtgtttgctgcgctgggtgggctgcagcatgtgtttgctgcgctgggtgggctgcagtttggtccacgctggaagcattttgcttttcagttggtgtcttttgttccagtgtgttatgtgttactttctacatcattttggaactttttgcaaaatctaagcctggatcctacatgataagaggccaaccttagcctcgagtctattcaatgatttaagctatgaaattaggaggttcctacatgctgccatgtcagggggcctcccgggagcagatgctaatgctaccaccatgatatgggcgatagagaggtccctcccgtaggcagcaatcaggtgtttcttccacgaacctctcttccctttggtctgtagtgtgttttactccagtcgccagaaacaccccacatttctgattttgtataaacaataaagtgaagtagaatgtaaaaaaaaaaaaaaaaaaaaaaaaaaaaaaaaaaaaaaaaaaaaaaaaaaaaaaaaaaa

SEQ ID NO: 915 - DNA, 1907 bp, Rattus norvegicus
atgagtcgtaactacaacgatgagctacagttcttggacaagatcaataagaactgctggaggatcaagaagggctttgtgcccaacatgcaggttgaaggggtgttttatgtgaatgacgctctggaaaagctcatgtttgaggagttacggaatgcctgtcgaggtggtggtgttggtggcttcctgccagccatgaagcagattggcaatgtggcagccctgcctggaatagttcatcggtctattgggcttcctgatgtccactcaggctacgggtttgccatagggaacatggctgcctttgatatgaatgaccctgaggcagttgtatccccaggtggtgtcggatttgatattaactgtggtgtccgcttgctaaggaccaatttagatgagagcgatgtacagcctgtgaaggaacaacttgcccaagctatgtttgaccacatccctgtcggggtgggatcgaaaggtgtcattccaatgaatgccaaagacttggaggaggcattggagatgggtgtggactggtccctaagagaaggctatgcctgggctgaggacaaggagcactgtgaggagtatggaaggatgctccaagccgaccccaataaggtctcacccagagcaaagaaaaggggccttcctcagttggggaccctgggagcaggcaaccattatgcagagatccaggttgtagatgagattttcaacgagtatgctgccaagaagatgggcatcgaccataagggacaggtgtgcgtgatgatccacagcgggagcagaggcttgggccatcaagtagctacagacgcactggtagctatggagaaagccatgaagagagacaagattatagtcaatgaccggcagctggcgtgtgctcggattgcatccccagagggacaagactatctaaagggaatggctgccgctggaaactgtgcctgggttaaccgctcgtctatgaccttcttaacccgtcaggcttttgccaaagtcttcaacacaacccctgacgacctggacctgcatgtgatttatgatgtttctcacaacatcgccaaagtggagcagcacgtggtagacggaaaggagcggacgctgttggtgcacaggaaagggtccacccgcgctttccctcctcaccatcccctcattgctgttgattaccagctcactggacaaccagtgcttatcggtggcaccatggggacctgtagttatgttctgactggcactgaacaaggcatgactgagacctttggaacaacctgtcatggagcgggccgtgctttgtccagagcaaaatcacgtcgtaatttagatttccaagatgtcttagacaagctggcagacatgggaatcgccatccgggttgcgtcccccaagctggttatggaagaggctccagaatcatataagaatgtgacagacgtcgtgaacacttgccatgatgctgggatcagcaagaaggccattaaactgagaccaattgctgttattaaaggatagatccaagactgtcagcatctctgaggtgcccatggactgagatccctaagacacccactcgaggcctgacaagatccgaatggcagagctgtcgctatgcacaccacaatggctggtggagaggctgctgtcacacacaggttggaagatagccttccagaagacatgtatctctgttgggaacagtcaagtgagcctgtcccacggggttctgtgactcttggggtgtgggaagggatcaagaaatgccctacttggtcatacaagtctgtaatcagcagagtggacttctttacaccaagctctgtagcccagtaggtatcatgaaaacattctattaaataggtttttgaatgttaaaaaaaagaaaaaaaaaaaaaaaaaaaaaa

SEQ ID NO: 916 - DNA, 423 bp, Rattus norvegicus
ttgcaaagggatactgcaatggacgtttattctgagtatcaataattaggcaaaattctgttgaaactttttgtcattgaccatatggaatagaattttgcttatgtgtataatattaccattattagaacagttcaagtattccaaatgtacacacttttgagttttatattgaataggtgtcattaattattttccaacattcccaagctgaacactcattctgccaacaacgcagcgaaacgttgcaggttgtatctcccagcacttcattgggttggtgaataaacttattgcactgtacaaagatttcttcatctttggcactgttggacagaagtcattcactcccacttttgtaattgaattattatgaaggaagattatctggaggtatttgaacttctgcaatccctgaaggat

SEQ ID NO: 917 - DNA, 411 bp, Rattus norvegicus
ttaaccggcccagttaaggcttaagaagggcttggtgggatccaaggaattgggttggccccctttttggcgggcttaaaccagcccttttttttatttattccctttgaagggccccagaaaacccttttaaatggcaattaaaaattcccttgcttggcaaaaccccagccaaaagggtttaattttcttttgaaacctttaaagtaccccggattgtcagggttaattaaatggtaggtgaaaatggtttcaattaaagaaacctttttcttttttaaaccaggggttgggccccaggtgggcttttttccccaaagacaaccttaaaccattggaaaccgtaccttaagttcaggcagcaagaaaaccagcgaatcttttaagcgccctcaaatttaatggtttttt

SEQ ID NO: 918 - DNA, 1610 bp, Rattus norvegicus
cagcgtggggagcgctgggagcggctacggcgtgcggggagctgaggtaaagccggggctagtacggtaccaggcggtgcacgagctggctaagcaagatttgtaaaaatggagtttcaagccgtagttatggccgtcggtgggggatctcggatgacagacttgacttccagcattcccaagcctctgcttccagttggaaacaaacctttaatttggtacccgctgaacctgcttgagcgagttggatttgaagaagtcatcgtggttacaaccaaagatgtccaaaaggctctgtgtgcagagttcaagatgaaattgaagccagatattgtgtgcattcctgatgaggcagacatggggactgcagattctctacgccacatatatccaaaacttaagactgatgtgctggtcctgggctgcgatctgataacagatgttgccttacacgaggttgtggacctgttcagagcttacgatgcatcacttgccatgttaatgaggaaaggacaagagagcacagaaccagttccaggtcagaaggggaaaaaaaaaacagtggagcagcgtgacttcattggagtggacagcacaggaaaaaggctgctctttatggctaatgaagcagacttggatgaagagctggtcattaagggatccatcctgcagaagcaccctaggatacatttccagacaggccttgtggatgctcatctctactgcttgaagaaatatgttgtggatttcttaatggaaaataagtcaatcacttctatccgaagcgaactgattccatacctagtaagaaaacagttttcctcagcctcctcacagcaaaggcaggaagacaaagaagaggatctaaagaaaaaggagcccaagtctttagatatttacagttttataaaaaaagacaacactctgactttggctccctatgatgcctgctggaatgcttttcgaagagacaagtgggaagatttgtctagatcacaggttcgctgctatgtccacatcatgaaggaaggactttgctctcgagtaagcacactgggactctacatggaagccaacagacaggtacccaaattgctgtctgttctttgtcctgaggaatcaatgatccatccatcagcccagattgccaacaaacacctgattggagccgacagccttatcgggtcagatacacaagttggagagaagtcatctattaaacgatctgtcattggctcatcctgtgtcatcagagacagagtaactgttaccaactgccttctcatgaactctgtcaccgtggaagaagggagcagcatccatggcagcgtcatctgcaacaacgccgtggtcgaggcgggcgcggagatcagggactgtttaattggaagtggtcagaggattgaagccaaagctaaacgcatgaacgaggtgatcgtgggaaatgaccagctcatggagatctgaatcctgaacaagtctgaccccttccttttggccccaaaactacagatgttggctggcccacctgtttgactctgtatttatttttcaataaagaagaatttccaggctgtaaaaaaaaaaaaaaaaaaaaaaaaaaaaaaaaa

SEQ ID NO: 919 - DNA, 2316 bp, Rattus norvegicus
atggattcccagcgggagcttgcagaggaactccggctttaccaatccacccttcttcaggatggtctaaaagatctcctggaagagaaaaaattcatcgattgtaccctaaaagcaggtgacaaaagttttccttgccacagactgatattgtcggcttgtagcccttacttccgtgagtatttcttatctgaaattgaggaggagaagaaaaaggagatggcgctagacaatgtagatcctgctatacttgatttgatcatcaaatacctgtactctgccagtattgatctcaatgacgggaacgtgcaagacatcttcgccctgtccagccgcttccagattccgtcggtgttcaccgtctgtgtgtcttaccttcagaaaagactggctcctggtaactgtctggccatcctaagattggggcttcttctcgactgtccaagacttgccatttctgcccgggagtttgtgtcagatcgctttgtgcagatttgtaaggaagaagacttcatgcaactgtccccacaggagctgatctctgtcatttcaaatgacagcctcaatgtagaaaaggaggaagtggtatttgaggccgtgatgaaatgggtacggacagacaaagaaaacagggcgaaaaatcttagtgaagtatttgactgtattcgttttcgccttatggctgagaaatatttcaaagatcatgtcgagaaggatgacataattaaaagcaacccagaagtccagaaaaaaatcaaagttctaaaggacgcttttgcaggcaaacttccggaacccagcaaaagcgcagagaaaggggggacgggcgaggtgaacggtgatgttggtgatgaagacttacttcctggttacctgaatgatatccccaggcatggaatgttcgtcaaagatctcatcctcttggtcaatgacacagctgcagtggcgtatgaccccatggaaaatgagtgttatcttactgccctagctgagcagatccccagaaatcattccagtattgttacccaacagaaccaggtctacgtggtcggaggactgtacgtggacgaagagaataaagatcaacccctgcaatcctactttttccagcttgataacgtatcatctgagtgggttggactaccgcctctcccgtcagccaggtgcctctttggtctgggagaggtagatgacaaaatctatgtggtcgccggcaaagaccttcagacagaggcctccctggattccgtgttatgctatgatcctgtggctgcaaagtggagcgaagtgaaaaatcttcctattaaagtttatgggcataatgtgatctcacataatgggatgatatactgtctgggcggaaagacagatgacaaaaagtgtacgaatagggtgtttatctacaaccccaagaaaggagactggaaggatctggctccaatgaaaaccccacgttccatgtttggagtggcaatccacaaaggcaaaatcgtgatcgcaggaggcgtcactgaagatggcctttcagcttcagttgaagccttcgacctcaaaaccaataagtgggaagtgatgacggaatttccccaagaaagaagctccatcagcctggtgagcctggccggatccctgtacgccatcggcggctttgcgatgattcagttggaatctaaagagttcgcgcccactgaagtcaatgacatatggaagtatgaagatgataaaaaagaatgggctgggatgctgaaggagattcgatatgcttcgggagctagttgcctagcaacacgcttaaatctgtttaaactgtctaaactataaaggaggtgacaaagacacggtttgagaggtggcttgttgggacaagagggccttaatgtattgtccttctttaagcctatacaatgattcatgtagggtaacattgatctgtgcagttccccgggagataaaacagtgtaaccgaatccccaaggtgttttagcgtgtggagtataaaaccgtttgctagggagttagtatacagttgaacaatgtattttgtcaaacctttctcatagaagcgagctttctacatcctgatgtttactaatcctttgtattcttaaggtacatttacacttgttttctattataaatgaaatgcatatgtctacactctcaagagatgtttgagtaacagaaacctctccccggttttgagctacgacaggaatcttgtgcattttaatgaagatgactggaagtgctgtataagaagtgtaataaaggagtgtccagtcccttccccattaaaaaaaaaaaaaaaaaaaactc

SEQ ID NO: 920 - DNA, 409 bp, Rattus norvegicus
ttaaatgggagctttgtgcaccccccacacacacataggactccacatactatgagtggatggtagcctatgcaaatgagaaccggaacataatcaaatctgacttgtaaatcagcaaaggaaacgtgtttctccagaagtcaagatgtcaaagatacattttaccggttctgtatacactccgccttaagggtccatccgctttgaatgttctagacgcacacctctgaggaaatctagtgtgttttgaggcaggagacatcaggcagatccaaattctcgtcttgggaaggtcttcagaccctgcgcatggagacgcagcttggcattgtctttagcaggagcgatcttttcagtgtgagcctgcatttcctttggagcttgactccaattcacagaacacgtcccg

SEQ ID NO: 921 - DNA, 430 bp, Rattus norvegicus
  misc_feature (1)..(430): n = a or c or g or t
ttgtggggttcatccattgcacatgggaacccgataattatagagaaggtagaaaaatgaccccnggcaaagcactgggaacaactaggaaaaggaaaagaaaaattcgagaaagagttaaggaaaaagcacagggctttctgtttaaccttccattgaaaagaagccagaaggaagaggagataagagaaatcaacaacctgggaatcaggagggagctgtggggagactttaaagagttctggatcactcgaaggcatcactggaaggctgcaagctgctgcccacccagggactgggtgctgggagtctaattattcgttcacctggggagaaggcagagacatctgcagctgatgtttccataggaatggcgcttgacgtgaaccttcagggaaagaaaggtataccacaggctgtgtgggaagaa

SEQ ID NO: 922 - DNA, 281 bp, Rattus norvegicus
ttctggaaaaacttcagtttaataaacagaactaaatgggaactcactctgcactggacacggcaccaggcatgagtgtttgagcagagggcgtaggtcttcagtcatcaggcaaagaaaatgggccacagtgggtggcacacacagggggtggcacacacaattcctaggaacaagtgttgcagactccccacgtttagggaacataaaacagtcaaaatgtcaattccaaatacataatagaaaaactcataggctctttggacaaaacccatcaagcg

SEQ ID NO: 923 - DNA, 424 bp, Rattus norvegicus
ttctttttttcggagctggggaccgaacccagggccttgcgcttgctaggcaagcgctctaccactgagctaaatccccaaccccacatcaattgtttcaaattgcatcactgactataaacattaaaatggtaagatgtctgaagggagaagtctcttacatccataacatgtatgatcctgtttgctgactctgctgttaaagtatgactgatggaggctggggatataattcatggtagaatgctgccttctatattagatttatgcattttcttatttttatgtgagtattttggctgaacatatgcatgtgcaccacttgcatgcctggtgcctccccagaggtcaaaagaggctgttggatccctggaactggtgttttagatcattgtgaatcaccatgtgggtgctgggaatcaaa

SEQ ID NO: 924 - DNA, 401 bp, Rattus norvegicus
ttcccttcccagttttttttaaaggtttaaaaattccacccccggtattttttcccgggccttagttcccttggttaaaaaggggggggggggcccccggtttccttctttttttaaattaaggggccaccggtccaaggtttttttcccacttcccggggggaaactaagccctagcttaagattgggttttttccttttccccccttgcccccattccggtttttttaaggttccttaccaaattcaattcccggggggtttttccaaaagtcaattccttgcttttccccttcttgggttatttaaaaaaaactaaaaacctggggggggtttaaaggggcacttgttaaaactgaaggggccccaagcatggcccctttttacccgggaggggggga

SEQ ID NO: 925 - DNA, 569 bp, Rattus norvegicus
ttccaacagggtttctctgtgtagctccatttgccctttgaactcgatctgcagacctcaatggccttgaatgcagagatccccctgcctccgactttggagtgctaggattaaaggcgttcgccacctcagtctggctcgaagcttcatttccaaaggccccagatcctctggagaagcaggctcccagaggtaggagttgggatgctgttggggtgtgaacagacgttacagtgcatgttcagaggcgagaggacagggttagggagttggttctttctttccatctttatgtgagcttcagggattgaactcagttcctcaggcttgtgttgcaagtgcctttaccactgagccatcttgctagcctagagcatcccagagttgaaaggatatgtttagattataaagaattcccggggttggggatttagctcagtgggagagcgcttgccttacaagcgcaaggccctgggttcgggcccccacttccgaaaaaaaagaaaaaggaccccctaaacacttacaattaaaaaaggaagaattcccaggaggggtgggcgggcttt

SEQ ID NO: 926 - DNA, 437 bp, Rattus norvegicus
ttgggagaagagtctgaaaaagtaaactttaattaaaaaaaaataataataatacaacttcaggttcgtgctaggctctcccacttggccttttacagactggtcggttttccactgaattcggagaagctgaagatgtaccacagaggacacagagcaccatcacttctacaggcaaacagctcgtgcacaggcttgaccaatgtccgtggctcgagtgactaagcggcaaggctggtttcccggaagttcaaaacgccagcttcttcatcagcaggtagactcgggagtccacctcaaatccatgcaggttgttggcgtccccctgaagcctcatgaggaggccgccataggacacatacgcagagagacgtgtggctgcttccgttgaggtctcgtccccttcgatcctgtacactttcccatacattacatac

SEQ ID NO: 927 - DNA, 398 bp, Rattus norvegicus
ttggtctggatatttacaaaagatcaccacagacagattatcctggtgttttctctataacgaagacttggctgctctctggggagaaaactgtgccagttggtctaggttcagaagatgaagattttggtggtgaattaaggcttctgtgggacgtcggaacagtttcacgacactcagagatggagaggacagaaagagcctaggttgttctagccagtcttctttgcctcaggaagctgcatcccagctagtatcttctgttacacttttggtcccctccttcctctgcagtcctgactgataacaaggcttctatgccttgtaggaggagcctttcgagcttgtaatgattcctcacggttaatatgaaaacctcgtggacattgcctgccatg

SEQ ID NO: 928 - DNA, 704 bp, Rattus norvegicus
ccgccgtcttcagcttgcaactatgttttccagagctacccggagtctggtaatgaagacaggaggactcagaactcaagggacacacagcccaggaagtgctgctagcagcagccagcggaggatgaccccctatgttgactgctatgctcagcgctcctatcccatgccggatgagccttactgcacagagctcagcgaggagcagcgggccctgaaggagaaagagaagggcagctgggctcagctgagccaagcagagaaggtggccttgtaccggctccagttccacgagaccttcgcagagatgaaccatcgctccaacgaatggaagacagtaatgggctgcgtcttcttcttcattggattcacggctctggtgatttggtggcagcgggtctatgtgttccctaagaaggttgtcaccctgacggaagaacggaaagcccagcagctccagcgcctcctggacatgaagagcaaccccatacagggcctgtctgcccactgggattacgagaagaaagagtggaaaaagtgaccaacatcacagtctgctgcctgcccttgcaaaccgattccgcttccgcagcctaggagaccctcctctcctctcttctcctcccttcccctcccccacctcctgtcttgtctcctccattcccttctgctccaataaaagcagcctgcattgttctgcctgc

SEQ ID NO: 929 - DNA, 361 bp, Rattus norvegicus
  misc_feature (1)..(361): n = a or c or g or t
gtctgtataaaatatttattttnncggggctggggatttagctcagtggtagagcgcttgcctaggaagcgcaaggccctgggttcggtccccagctccgaaaaaagaaccaaaaaaaaaaaatatttatttttggaggacagtgtggtctggtgtatgggagcttgctccacccgcccagccaaccaagaagctgggaatagatgcagcagcaggctcctgacaggccagctccactatgcatatcccagagcacaccagggcctgctctgaactntagagcgagagtcagagagctgggatggtttctgccccagcagacccccaaagagcccacgtgacgtctttagcaccagccgtt

SEQ ID NO: 930 - DNA, 360 bp, Rattus norvegicus
  misc_feature (1)..(360): n = a or c or g or t
ctgctgcaacgtgtttattatgtgccaaaaaaagtacaccacagcttactccacaatctgtacagagtgcagtcttgcctgcatgtacaacaatgaggtagagacttcacacacagcttcacgagcccacagagtagctgggatatgcgacaatgcaacgtcagctcagcaggggggcgacactggttctttggcacacagcttccctaagaggggcaagtagtaactaaatttttaaaaaaagagtcaagttttcaattccagtaacatttttgtcancaataactgttgattcatacattcttcaaataaaagttgtaaggaagggtacttgcccctctaagngaaagggctcctgtg

SEQ ID NO: 931 - DNA, 368 bp, Rattus norvegicus
  misc_feature (1)..(368): n = a or c or g or t
aatttgtaaagactttatttctgtatgtctatattttaacaaatacttttaaatatacaaaaccaacatattaatacagtcaatgtaaggnaaagtgctcagttatctaaattacagtattctggaggnaaaaaaaagccatggtgaaaatcttgaaagatccaacagcacacagtacagtccattttctattaatgactttctgtaagtgttcaaaatatagactgctctctgtatcagtgaaagcaaaaatttccaaatagatttgccattgcttaaaatttctgggaactggattcctatgactttatatggnaatactttgagtaaaccaagtactttttttatcagacactgaagtattatga

SEQ ID NO: 932 - DNA, 684 bp, Rattus norvegicus
tgtagtcgcaccaactgactagtctcttccatcctccggagctccgacgttctcggggacataaaccctgttcttgtcctaacccgccaaggggccatggacttgagcgcgctggcgtcgagcagagaagtacggggccctgggcccggggctccggtgaaccggcccctgctaccgctactgctgcttctgctcttgctacctctgcccgccagcgcctggtacaagcacgtggcgagccctcgctatcacacagtgggtcgtgcctccgggctgctcatggggctgcgccgctcgccctacctgtggcgccgtgccttgggtggggccgctggaccgctcgtggggctcccgggacagatggcccgcagcgctctcctgcttccttcccccgggcaggagctgtgggaggtacgaagcaggagttcaccggcaggacttcccgtgcatgcaacccggagtctgcgggacctggagggagccggccaacctgagcagtcgctaagctttcagtcctggacttcagcagagcccgctgctagagccttcggtgagacgcttcgtgcccagccatggttcctgcagcaaatcatctttgccgatcctgtcaggctcgacgaccgtctcaagaaccgatggcgcccccgtgcttgacctaagcaggagcacagcttgtagctccag

SEQ ID NO: 933 - DNA, 2626 bp, Rattus norvegicus
atgttacccatgtactcgggagccggccccgttcttgcgtctcctgctccgacaacatcacccatcccaggatatgccttcaagcctccacctcggccggatttcggcaccaccgggagaacaatcaaactacaggccaatttctttgaaatggacatccccaaaattgacatctatcactatgaattggacatcaaacctgagaaatgccctcggagagtgaacagggaaatagtggagcatatggtccagcactttaaaacccagatcttcggggaccggaagccagtgtttgatggacggaagaatctgtacacagctatgccccttccaattggcagggacaaggtggaactggaggtcacgctgccaggagaaggcaaagatcgcatcttcaaggtatccatcaagtgggtatcctgcgtgagcttgcaggcgttacacgatgcactttcggggcggctgcccagcgtccccttcgagacgatccaggccctggacgttgtcatgaggcacttgccatccatgaggtacacccctgttggccgttccttcttcactgcatcggaaggctgttccaaccctctgggagggggcagagaagtgtggtttggcttccatcagtccgtccgaccttctctttggaaaatgatgctgaacatcgatgtatcagcaacagcattttacaaggcacagccagtgatcgagtttgtttgtgaagtgttggattttaaaagtattgaagaacaacaaaaacctctgacagattcccaaagggtaaagtttaccaaagaaattaaaggtctaaaggtggagataacgcactgtggtcagatgaagaggaaataccgtgtctgcaatgtgacccggcggcctgccagtcaccaaacgttcccactgcagcaggagagtgggcagacagtggagtgtacagtggctcagtacttcaaggacaggcacaagctggttttgcgctacccccacctcccatgtttacaagttggacaagagcagaaacacacctaccttcctttggaggtctgtaacatagttgctggacagagatgtataaaaaaattaacagacaatcagacctcaaccatgatcagagcaactgccaggtcagcacccgatcggcaagaggagatcagcaaattgatgcgaagtgcaagtttcaatacagacccgtatgttcgtgaatttgggatcatggtgaaagatgagatgacagatgtgacaggacgggttctgcagccgccctccatcctctacgggggcaggaacaaagcgattgccacccctgtccagggtgtgtgggacatgagaaacaagcagttccacacgggcatcgagatcaaggtgtgggccatcgcctgctttgcaccccagcgccagtgtacagaagtccatctcaagtccttcacagagcaactgaggaagatctcaagagatgctgggatgcctatccagggtcagccctgcttctgtaaatacgcacagggggcagacagtgtggaacccatgttccgacacctgaagaacacatacgctggtctccagctggtggtggttatcctgcctggcaagactcctgtgtacgcggaagtcaagcgtgtgggagacacggtgctgggcatggccacgcagtgtgtccagatgaagaacgtgcagaggaccacgccacagaccctatccaatctctgcttaaagatcaatgtcaaactgggaggagtcaacaacatcctgctgccacagggcaggcctccagtgttccagcagcctgtcatcttcctgggagccgatgtcacccacccaccagctggggatgggaagaaaccttcaattgctgccgtcgtgggcagcatggacgcacaccccaaccgctactgtgccaccgtgcgcgtacagcagcaccgacaggagatcatccaggacctggctgctatggtgcgagagctgctcattcagttctacaaatctacacgcttcaagcccacccgcatcatcttctaccgagacggcgtctctgagggccagttccagcaggttcttcaccatgagctcctggccatcagagaggcctgcataaagctggagaaggaatatcagccagggatcacattcatcgtggtgcagaagcggcaccacacacgtctcttctgcacagacaagaatgagcgggttggaaagagtgggaacatcccagcaggcacaaccgtcgacacaaagatcacccacccaactgagtttgacttctacctgtgcagtcatgctggcatccaggggacaagccgtccttcccactaccacgtgctctgggatgacaatcgtttctcttctgatgagcttcagattctgacctaccagctgtgtcacacctacgtgcgctgcacacgctctgtgtcaattcctgcgccagcttactatgcccacctggtggccttccgagccaggtaccacctggtggataaagaacatgacagcgctgaaggaagccatacctctgggcagagcaacgggcgagatcaccaggcgctggccaaggcggtccaggtccaccaggacacactgcgcaccatgtactttgcttgacatgttgtattgtttagcgattgtgtggaattcc

SEQ ID NO: 934 - DNA, 445 bp, Rattus norvegicus
  misc_feature (1)..(445): n = a or c or g or t
ctactagagtttttatttattgaggtctctatcccaaccagtcatttaaaaaccaagtaccacagacctgaggggtaggagctaggaactgtacctcctcaccacacgaacagcagtggggaagaagatgagggcagcagaggtggagaagggagacgacaatagcagcagcaatggggcatcaatgtcacagagacagccactcggtcctcccccaatccctagctagagcccctatggcttggggtggaagaggtaagtcccaccccaggtccctcctctcagacagcctcctcagggctcaacccatttnttctgtcaggagactcaggcacatgggagaggaggaagtggggggaggagactttgggagaggcagggtntggtaggatnaaggcagaagtgggggggcattagcaaggttttaaccctgccattcccacca

SEQ ID NO: 935 - DNA, 373 bp, Rattus norvegicus
  misc_feature (1)..(373): n = a or c or g or t
aattggaattcactttaataatttttaagtgacatatggcactgtaaggncaggaaggaaaaagtcacaaagtccacaaactcgtgaaggtgtcagctcaaaaggctagaagtcactgcactgttggntcgacgctcacagtaaacgttttgtaacgaaggcatgttgaatttagtgtcattcattacagagcagagggtgtttctcttatttggtcacgtgtttttcacttaagaaatattttaaaaatggtattcactttttatttcaacacgttcactgggcatctccaaaaccagcagcttctcaaangaaatcaaccagggttgtaaacataagatacaaggttctgactcccgacactcaggtttcg

SEQ ID NO: 936 - DNA, 219 bp, Rattus norvegicus
  misc_feature (1)..(219): n = a or c or g or t
agttttaggacatttaattaacacttgatgtgcatatgantgggaaaactggagcnagggtggagggtggttccctgagctggggacccagagagtgatgctgacagatgggacccttggtagaaagacccattcctgagataagctgtgattcccatgctgactgggtgggtggagacttctccaagaacccagatgtgagcacagtcagttgggatt

SEQ ID NO: 937 - DNA, 367 bp, Rattus norvegicus
  misc_feature (1)..(367): n = a or c or g or t
tttgaactctgaattagacagtttgtattctaaaacacacacaaatctgtaccaattaaatacaaagtcgaaagggaatataaattacagttttngttttcaacggatgatagtaaaacactaccgtcagctcaccacacacacaaacagcagcttttcaatagagtctcccaggcctccctcaccaatgctaaggacttaaaaaataaaaagtacagcaggctgcacatgctctctcacttcctcacaatacacggatagctgtacactgaggtccattgtacaggcatctacagagtaagtacataaaatatatttgtaaaattcttccacgcacgatcctacaatgtctctcctcgcaggatac

SEQ ID NO: 938 - DNA, 361 bp, Rattus norvegicus
  misc_feature (1)..(361): n = a or c or g or t
cacactgagcaccgcagctcctgacagantgtccacccagcagcagggntcgcacttactcccactcaggtttcctaagaccacgttccatggcaggttccaaatagcgtgggccaaccaagtgcaggtgcaaataatcacaggtcggcattggcgtggacaaaggttaaaaggacacagcaagagctgcgtggctcagattcgccagcaggggtgaaggcagccttcctcccaaaggaggctggacagtntgggcagggaaggccacaaagcacagaccgggcaggcaggtgccacttcagctaggcaagcagattaaacacctcantggtgggggatatcctgagggcaagcaccattt

SEQ ID NO: 939 - DNA, 345 bp, Rattus norvegicus
  misc_feature (1)..(345): n = a or c or g or t
aatttaaaattatgcttttattaacattggaacagctcttttatatttatagtcttgacaccaaggtaatttaaagagcatttggtcgttgaggaaggcataagtngtagtatgcatccttgttccaaaagtctggacccttccatccacaccagcccttttccaatataacttgcaggncttcagcacctgtatagtgtgggtctagaattaggaatttgatctgccctgtagtttcattccatgcgactcctagtattgtgtgagccaatactcctcccccaatcattactgggagtgnccacatttctgggaaatgggttggctagttcccggtccttgagg

SEQ ID NO: 940 - DNA, 283 bp, Rattus norvegicus
  misc_feature (1)..(283): n = a or c or g or t
cccaaatctaaaactacctttatttgtggctggctcagcataagtngccttcatcagtgagcagaattataaaactgtacaagaggtaaaaaaataggccgtttaacttagtgaccctcatatcatgagctttgaaaatacacataaaattgtacaatctggcagtttataaaatataaagctaaaaagaatattttagttcccacaaagaggagtgaatcacacaatcagcacatatccattaaacanttaactgtccacagagaagacacatggcacaaga

SEQ ID NO: 941 - DNA, 295 bp, Rattus norvegicus
aaagtttcaggttattattttgttctgttttcactttgtttataacttatttatttttctcacaaaaacagagagtcctggttagtgtaaatactgtccaaactgaggcaaacaaagggatgggtgtggaagaaagggttgggaggtggagggaaaggcacaaataacatttgaaagatcgtccatttttcgttctaactcgtattttccatgctgagaaggaagccatgactccagaccatgtaccctactggacgtttcacccgcagtttgcagcttcagttgccagccttga

SEQ ID NO: 942 - DNA, 267 bp, Rattus norvegicus
  misc_feature (1)..(267): n = a or c or g or t
cttttcctgtgaacattttaatgcaaacagtatagtgctttcaactctaggcatctgggaagaaacagtgctggaggggggaacatgtgcagctctgtgagtnagggcagctataccaccctgcccctaactgcagaagccgatgcctgtcaaccttcactgaggaggctgtggaaatatcacagtgagttccaggccagcctgggctacatagggaggctcagaaaaccaaaaccaaacaaattaaaaactaaacaaaaaccaaag

SEQ ID NO: 943 - DNA, 389 bp, Rattus norvegicus
  misc_feature (1)..(389): n = a or c or g or t
aagagcttnctaaaactctttattaatcaaattgttaacttttaatagaacttgagacaaaaatctacagtttaaacagctatcttatggtaataaacattaatcctgtaagtnctgtggagaagcagttactccacatatagagacctaggtcaggaattggaaccaactagattacttagggaaggagttttncgaagttagttttgacatgaccaaattcagtgtgttctgaatacttgtgttatttctctctactatagaagaatttctnccgcttgtttttccatttncttctgattcaagggggaggagagtatgcgggttgaatagatttcgaggttcccccaagatgccaactacgggcataaccacagactccagattcg

SEQ ID NO: 944 - DNA, 2062 bp, Rattus norvegicus
ggcggcagggcggccatgactgcggagcaagcgctgcccctgggcaacgggaaggcggccgaggaggcgcgagggtccgaggcgctgggcggcggcggcgggggcgcggcggggacgcgcgaggcgcgcgacaaggcagtccacgagcgcggtcactggaacaacaaggtggagttcgtgttgagcgtagcgggagagatcatcggtctgggcaacgtgtggcgcttcccctacctgtgctacaagaacggcggaggggcattcctgattccttacgtggtgtttttcatctgctgtggaatccccgtcttcttcctggaaacggctctggggcagttcacgagcgagggcggcatcacgtgctggaggagagtctgtcctttatttgaaggcatcggctatgcaacacaggtgatcgaggcgcatctcaatgtctactacatcatcatcctggcgtgggccatcttctacttaagcaactgcttcaccaccgagctcccctgggccacctgtgggcatgagtggaacacagagaaatgtgtggagttccagaagctgaacttcagcaactacagtcatgtgtccctgcagaacgcaacctccccggtcatggagttctgggaacgccgggtcttggctatatctgatggcattgaacacatcgggaacctccgatgggagctggcactgtgtctcctggcggcttggaccatctgctacttctgcatctggaagggtacgaagtcaactggaaaggtcgtgtatgtcactgcaaccttcccctacatcatgctgctgatcctcctgatccgaggggtcacgttgccaggtgcctcggaaggcatcaagttctacctgtaccctgacctctcccggctctctgatccacaggtgtgggtggatgctgggacgcagatctttttctcctatgccatctgcctgggctgcctgaccgctctggggagttacaacaactataacaacaactgctacagggactgtattatgctctgctgtctgaacagtggcaccagcttcgtggctgggtttgctatcttctcagtcctgggcttcatggcgtacgagcagggcgtgcctattgctgaggtggcagaatcaggtcctggactggctttcatcgcctaccccaaggctgtcactatgatgcccctgtccccattgtgggccaccctgttcttcatgatgctcatcttcctgggcctggacagtcagtttgtgtgtgtggagagccttgtgacagccgtggttgacatgtaccccaaggtcttccggcggggctaccggcgagaactgctcatcctggccctgtccattgtctcttatttcctaggcctggtgatgctgacagagggaggcatgtacattttccagctttttgactcatacgcagccagtggcatgtgcttgctcttcgtggccatctttgagtgtgtctgcatcggctgggtgtatggaagtaacaggttctatgacaatattgaggacatgattggataccggccactgtcactcatcaagtggtgctggaaagttgtgacccctgggatctgtgcgggcatcttcatcttctttctggtcaagtacaagccgctcaagtacaacaatgtgtacacatatcctgcttggggctacggcattggctggctcatggctctgtcctccatgctgtgcatcccgctctggatcttcatcaagctgtggaagacagagggcaccctgcccgagaaattacagaagttgacagtccccagcgctgatctgaaaatgaggggcaagcttggggccagcccacggatggtgaccgttaatgactgtgaggccaaggtcaaaggcgacggtaccatctctgccatcacagagaaggagacgcacttctgatccccgccagccacttggatgtgtctccagccttccttccctgcgtgtaaatgaatcctgaaccttgtatttcacctaatgttaggggcttgctcgtctgcacaggatttattaacaagttaactcccagccggccactgtgtgccctgtaccctcacctcac

SEQ ID NO: 945 - DNA, 2928 bp, Rattus norvegicus
gaggttctgccaaacgcagttcacttgcaacaatgctgtggacactacctgtgtgtcttctctcactgagtttttctgcccacattgcagctgtgtccattcagcatctttcgactggacatgaccacgatgatgtagacgttggtgaacaacagaaggacatttcagaaatcaactcagctgcaggcctgaacctttttcaaggggacatccttctgcccagaaccagaaatgccctgagagatccgtcaagcagatggaagccccccattccatacattctggctgacaatctggatctgaacgccaaaggagccatcctcaatgcctttgagatgttccgcctcaagtcttgtgtggacttcaagccctatgagggggagagctcgtacatcatcttccagcagttttctgggtgctggtctatggtcggtgatcaacacgtgggacagaatatttccattggtgagggctgcgactataaggccatcattgaacatgagatcctgcatgctctgggattcttccatgagcagtcaaggactgaccgggatgattatgtgaacatctggtggaatgaaattatgacagattatgaacataatttcaacacgtatgatgacaagaccatcacagacctcaacacaccctatgattatgagtccttgatgcactatgggccattttcatttaacaagaatgaaaccatcccgaccatcactaccaagatccctgagttcaacgccatcattggacagcgcctggatttcagtgccactgatttaacgagactgaatcggatgtacaactgcaccagaacacataccctgctggaccactgtgcgtttgagaagaccaacatctgtggaatgatccaggggaccagagatgatgctgactgggttcatgaggacagcagtcagcctggacaagtggatcacaccttggtgggacggtgcaaagctgctggctacttcatgtacttcaataccagctcgggggtgaccggagaggtagcccttctggagtctcggatcctttaccccaagaggaagcagcagtgtttgcagtttttttataagatgacaggaagcccttcagacagactcctcatctgggtgagaagggacgacaacacgggcaacgtgcgccagctggccaagatccagacttttcaaggagattctgatcacaactggaaaattgctcacgtgacactcaacgaagagaagaaatttcgctatgttttccagggtaccaaaggtgaccctggtaactcagatggcggtatttaccttgatgacatcactctgacagaaaccccctgccctacaggggtttggaccatccggaatatctcccaggtccttgagaacacagtgaaaggggacaggctcgtgagccctaggttctacaattccgagggttatggttttggggtgaccttgtaccccaatggtagaatcaccagtaactctggctacctgggactcgctttccacttgtacagtggggataacgatgtgattctggagtggccagtggagaacgagcaggccataatgaccatcctggaccaggaacctgatgccaggaacaggatgtccttgagtttgatgttcactacctccaagtaccaaacatcttcagctataaatggctctgtcatctgggacaggccaaccaaggttggagtctatgataaggactgtgattgttttagaagcattgactggggttggggtcaggccatttcccaccagatgctgatgagaagaaatttccttaaagatgacaccctcatcatcttcgtggactttaaagaccttacccacttgaggcagactgaagtccccatttccagcagaagcgtgataccccgaggactccttctgcaaggccaggagcctcttgccttgggagactccagaatagccatgatggaggaatccctgccaagaaggctggaccagagacagcccagcagaccaaagcgctcagtggaaaatactggtcccatggaggaccacaactggccacagtacttcagagacccatgtgacccaaacccttgccagaatgaaggcacctgtgtgaacgtaaagggaatggccagctgcaggtgcgtctctgggcatgcctttttctacacaggggagcgctgtcaggctatgcatgtgcacggaagcttgctgggcctgctcattggctgcatcactgctttgatcttcttgaccttcatcacattctccaacacttaccaaaagctgaggcagtgagctgatgtccactagactgcagaagggcctccttcacctagactttccttccagtagtcagtataatttggggatattcttcatcaaacatgtttgaaagagcctccaaaaccaaagccccaaacctcatgtggggctcttgccactccatttctgtacagttctgctatccttctatgagtttctggtgaatccattatgtcctaagataacagtcattgcattttactataaacactttgcttgcttgaccttctccccttaaatcaccaagtctagttgggtaggagcatgttatcctctgctaccacattgaccccagtgctagaagcataccttactggtgtattgtgggtactcagtaagcattaaatgaatgaaccaataagcaagtgaatagctgtggtataataagtctttttttcttcctcatattgtaaaacatatgattaagtctatttgcaggtgtatcagaaccaaatacccagtttacactagatgggaaaactactgtcttattgctcatgtagtttcttgtgaaatgatttcacagattcctctggtcagctgagtttccatggcatgtacttttttcttgttctgattttaaggaaaaggcttaataaaaccattaaatatgaaaaaaaaa

SEQ ID NO: 946 - DNA, 1178 bp, Rattus norvegicus
agaagggacgcacgcatagagaggggcggagccggagccctggagtgctgctccttgtgtgtgtggggctgggtggtggttggtgcggcagggcggctactcagctgcagcagtgcaggtgccatcctgtggaagaaccatgaagcactacgaggtggagattcgggatgcaaagacgagggagaagctgtgcttcctggacaaggtagagcctcaggccaccatttctgaaatcaagacccttttcaccaagacacacccgcagtggtatcctgcccgccagtccctccgcctggaccccaaggggaagtccctgaaagatgaagatgtgttgcagaagcttcctgtgggcaccacagctacgctctacttccgggacctcggggcccagatcagctgggtgacggtcttcctgacggagtatgctgggccccttttcatctacctgctcttctacttccgggtgcccttcatttatggccgcaaatacgactttacatccagtcggcatactgtggtgcacctcgcctgcatgtgccactccttccactacatcaagcgcctgctggagactctcttcgtgcaccgattctctcacggaaccatgcccctgcgaaacatcttcaaaaactgcacctactactggggctttgctgcgtggatggcttattacatcaaccaccctctctacacaccccctacctatggagttcagcaggttaagctggcactggccatttttgtgatctgtcagcttgggaacttctctatccacatggctctccgggatcttcgaccagcggggtcgaaaaccaggaagatcccataccccaccaagaaccccttcacctggctgtttctgttggtgtcctgtcccaactacacttacgaggtcggctcctggattggctttgccattatgacacagtgtgtcccagtggccctcttctccctggtgggcttcacccagatgactatctgggccaagggcaagcatcgcagctacctgaaggagttccgtgactacccacccctgcgcatgcccataatccccttcctgctctgagcagctcctcccgagctcagcccagtaatgccctccacctactacccctgtcctgatgtggctggccaaggctctccagcagcaacaataaaacctgcttacccaaaaaaaa

SEQ ID NO: 947 - DNA, 954 bp, Rattus norvegicus
ccggaatacctttcctcacaggattctattcaaaagatctcatcatcgaagccatcaacacgtgtaacaccaacgcctgagccctaataatcactttaatcgccacatccataactgctgtgtacagcatacgcatcatctacttcgtcaccatgacaaaaccacgatactccccactaattactattaatgaaaacaacccaaacctcattaatccaatcaaacgcctagcattaggaagcatcctagcaggcttccttatctcactaaatattcctccaactaacattcaaattctcacaataccctgacatttaaaaataacagccctacttattacaatcctaggatttgccattgccctagaacttaacaatttaacactaaatctatcaataagcaaacccaccaaactatcatcattctcaacctccctaggctactacccaccaattataccccgaattattcctcaaaaaactctaaattctagctacaaattatccttaaacctactagacctaatctgactagaaaagacaatcccaaaatcaacctcaatcacccaaacccaactatctaaaataatatccaaccaaaaaggactaatcaaactatatttcctatcatttctcatcactatttcactaatttttatcttacacacacttaatcccgagtgatttcaataataataaaaatccccgcaaacatagaccacccagccaccactatcattcaagtagcacaactataaatagccgcaaccccaatccccccctccaacataaccccaacatcatcaatctcatacattaatcaatcgcctagactatcaaaatcaactaactccaccttattattcaaactaaacaagtagaacactaccaactccataaaaagccctaaaacaaaaaaactaaaaataaaccaattagaccctcaagtttccgg

SEQ ID NO: 948 - DNA, 1423 bp, Rattus norvegicus
aggccggggcccgcgcgccatggacgcccctcagccggcgcggcgcggccgcggcctgagggcggtcatgtccggggtggtgcggaccctcagccgctgcttgctgccggccgaggccggagcccgcgagcgcagggcgggcgcggcgcgcgacgcggaacgcgaggcccgacggcgcagccgcgacatcgacgcgctgctggcccgcgagcggcgcgcggtgcggcggctggtcaagatcttgctgctgggcgccggcgagagcggcaagtccaccttcctcaagcagatgcgcatcatccacggccgggagttcgaccagaaggcgctgctggagttccgcgacaccatcttcgacaacatccttaagggctcgagggtgcttgtagacgctcgggacaagcttggcattccctggcagcactctgagaacgagaagcacgggatgtttctgatggccttcgagaacaaggcagggctgcctgtggagcctgccaccttccagctctacgttccagccctgagcgcactctggagagactccgggatcagggaagccttcagccgcagaagcgagttccagctgggtgagtcagtgaagtacttcctggataacttagaccggattggccagctgaactacttccccagtaagcaagacatcctgttggctagaaaggccaccaagggaatcgtggagcatgacttcgtgataaagaaaatcccatttaagatggtggatgtgggcggccagaggtcgcagcgccagaagtggttccagtgcttcgacgggatcacatcgatcctgttcatggtgtcctcaagcgagtatgaccaggtcctcatggaggataggcgcaccaaccggctggtggagtccatgaacatcttcgagaccatcgtcaacaacaagctcttcttcaacgtctccatcatcctcttcctcaacaagatggacctgctggtggagaaggtgaagtcggtgagcattaagaagcacttcccagacttcaagggcgacccgcaccggctggaggacgtccagcgctacctggtccagtgctttgacaggaagcgcaggaaccgcggcaagcctctgttccaccacttcaccactgccatagacaccgagaacatccgcttcgtgtttcatgccgtgaaggacaccatcctgcaggagaacctgaaagatatcatgctgcagtgagacagcccctctgccagtcctctcgtggcctctgtgtggccacatgtctctggtgtgtctgccacctgcatggacctgcagtgggcatctcgaagccacaccatctaatacctggcactaagaatgctggactgtcagccacaccagcgagctgcgggcaagaggatgggagtgtcagtgatagctactgaatcggggactgaaactactgaatcc

SEQ ID NO: 949 - DNA, 3030 bp, Rattus norvegicus
gaattccggcgtccgcccgggacgggcgcggctccggcgacatgtgcggcgggcggggaggcatctggctggctctggccgcggcgctgctgcacgtgtccctgcaaggcgagttccagaggaggctgtacaaggagctggtcaagaactacaacccgctggagaggccggtggccaacgactcgcagccgctcaccgtgtacttctccctgagtctcctgcagatcatggatgtggatgagaagaaccaagttttaaccaccaacatttggctacaaatgtcttggacagatcactatttgcagtggaacatgtctgagtaccccggagtgaagaatgttcgttttccagatggccagatttggaaaccagacattctcctctataacagtgctgatgagcgctttgatgccacgttccacaccaatgttttggtgaatgcatctgggcattgccagtatctccctccaggcatattcaagagctcctgctacattgacgttcgctggttcccttttgatgtgcagcagtgcaaactgaagtttgggtcctggtcctatggagggtggtcactggacctgcaaatgcaagaggcagatatcagcagctatatccccaacggagaatgggatctcatgggaatccctggcaaaaggaatgagaagttctatgagtgctgcaaagagccatacccagatgtcacctacacagtaaccatgcgccgtaggacactctactatggcctcaatctgctcatcccttgtgtactcatttcagccctggctctgctggtattcttgctgcctgcagactctggagagaaaatctctcttggaataactgtcttactttctctgactgtcttcatgctgcttgtggctgagatcatgccagcaacatctgattctgtgcccttgatagcacaatacttcgccagcaccatgatcatcgtgggcctctctgtagtggtgacagtgattgtgctgagatatcaccaccatgaccctgatggtggcaaaatgcctaagtggaccagaatcattctcctgaactggtgtgcatggtttctgcgcatgaagaggcccggagaggacaaggtgcggccagcttgtcagcacaagcctcggcgctgcagcctggccagtgtggagctgagtgcaggtgctgggccacccaccagcaatggcaacctgctctacattggcttccgaggcctggagggcatgcactgtgccccaactccagactctggggtcgtatgtggccgtttggcctgctccccaacacatgatgagcacctcatgcacggtgcacacccctctgatggggaccccgacctggccaagatcctggaggaggtccgctacatcgccaaccgcaaccgctgccaggacgagagtgaggtgatctgcagtgaatggaagtttgcagcctgcgtggtggacccgctttgcctcatggccttttcggtctttaccatcatctgtaccatcggcatcctcatgtcagctccaaactttgtggaggctgtgtccaaagactttgcttaatgttatcaagtaggaaatgcgcagataagaagagaatctggagggatgctccaagagtgtgccagctgcctgagtggttgctgagacttgctgatcctggttgcatgaagattcagctttcgtggttcgggtccctggagtcattcctctgccctgagaggaagatgaaagattcttcttcatcctttgtcatcacagagattttgccgttgctgcagtcagtgttaccgctgcgtgtgtcccgtcccactatggcccgctctctgaccctctgtgcactgctgcttgctggagaagactggactccagccgttgctgcccccttcattccctggtgactcttgctgccttaactggtcattttacagactgtagcttcacaggaatgccacctgcgtaaagctgctgtggactggggaattctgccctggttgtacagatctcagaaatggttccattgtctgctggttgttccagagaaaaatgactgatcctgaactgtcctggacttgacactttcgctgctattgtagcagccattactgctgcagacattgtgtctgcagtgtctggagttatcctcccccaatctattgttagacaaacacagtgggtaaactttctggagtagttactaacaattgggaattctaaattctattataggagcggcttgactacggcccttggtggtaacagctgaggtgaaccagatgaggtgcccgctatttatcgggagtggctctgtttggtgcagccctatgctgtggattagtgttcatgctgtggttggtttgcaaactcagatctcaacagaaacgtgacaaggccgttatcactcaagcacttgtggtcattgtacaaggggcctcccctggaatttggttatctatgctcaggaattagttggtatctgagttctctgctcttgcaccccatggatctgtggatccattgcactgggatgagagagactcaatgatcctttgatcagcccttccacatcgctgaggtttcctcattgcacgcgatagggtgatcatgatttgttataaaataaatgatttgtgataaattataaataaatagggggagatgtagagggccgctttaacattcgccaccacaagatggcgctggcttccactgtgccccacggggaaggccaggatagcttctgccattacaagatggcgctggcctccgccgccgagccgacttcctttcaggaagttaactgtgtgcgcatgtgcaagagtgccttcgtgccaggtctttgcccactctggggcgtgcctaatgagatcatgggtaagcgaccaatcaggtgtggatgtgccgcactagggtgtatatgagccgcgccatgcaggcgcgcggggctctctttaagatttaataaaagttttggctgctgtaaggaaaaaaaaaaaaaaaaaaaaaaaaaaaaaaaaaaaaaaaaaaaaaaaaaaaaaagccg

SEQ ID NO: 950 - DNA, 1816 bp, Rattus norvegicus
gagttacagggagctccaccagagaacatctcagggagcctggctggaagcagcagagctccgagtctggtctgctgtgagcatccgctgtcctgcggggagggctcccatccctggctctcgattgcaaagaaatccaagcggaggaagggcgtacaccattggtctggcacgctccaccgagcccgagcccaactcccagccaccatgcttctactcttgttggggatcctgttccttcacatcgcggtgctagtgttgctcttcgtctccaccatcgtcagccaatggctcgagggcaatggacacaggactgatctctggcagaactgtaccacatccgccttgggagccgtccagcactgctactcctcatctgtgagcgaatggcttcagtctgtccaggccaccatgatcctgtctgtcatcttcagcgtcctgtccctgttcctgttcttctgccagctcttcactctcaccaaaggcggccgcttttacatcactggagtcttccaaatccttgctggtctgtgtgtgatgagtgcagcggccatctacacagtgagacacagtgagtggcatgtcaacaacgactactcctatggctttgcttacatcctggcctgggtggctttcccgctggccctccttagtggcatcatctacgtgatcctgcggaaacgcgaatgaggcgcccgacgcaccatccgtctaggctctgagcgtgcatagggtacacagggagggaggaaggaaaccagaaaaccaaaccaaccaacccaaaagagctagcccccaaacccaaacgcaagccaaaccaaacagaacacagttgagtggggattgctgtcgattgaagatgtatataatatctatggtttataaaacctatttataacactttttacatacatgtacataggattgtttgctttttatgttgaccgtcagcctcgtgttgaatcttaaacgactctacatcctaacactataaccaagctcagtattttcgttttgtttcgtttttttcatctttttgttttgctcagacataaaaaaaaaaaaatccacgtggccccctttcatctgaaagcagatccctccctcccattcaacctcataggataaccaaagtgcggggacaaaccccagatggccagaggttcacactatgggtgacccagtgaatttagcaggaataatccgctgcccgaatcaatgtgtgaagccctaagcactcacagacgaaacgccctgaccagagccctctgcgaaaccaatagctggtggctgcggaacacttgaccctgaaggcggagtactggggccacatgtttaaatgagacgtcagagacaagcaatctgtgaaatggtgctatagatttaccattccttgttattactaatcatttaaaccactcactggaaactcaattaacagttttatgacctacagcagaacagagacccgatacaaacggttcgtaactgctttcgtacatagctaggctgttgttattactacaataaataaatctcaaagccttcgtcactcccacagttttctcacggtcggagcatcaggacgagcgtctagacccttgggactagcaaattccctggctttctgggtctagagtgttctgtgcctccaaggactgtctagcgatgacttgtattggccaccaactgtagatgtatatacggtgtccttctgatgctaagactccagacctttcttggttttgcttgctttttctgattttataccaactgtgtggactaagatgcattaaaataaacatcagagtaactc

SEQ ID NO: 951 - DNA, 1456 bp, Rattus norvegicus
aattttgtaagtaatgtatttatgtgttcctttgttctgtatatagctggccagggtctcctgactcggcctcatgagtagatcattgtagttctggatatgagacactgactggctctagaaatacctcattcacccgtgggaagaggagataggtagaacctcttagtgggttattggcagagcgccaacctcctggcttcaccttcctccggggtctgtgaggtgtatgcaaggcaggaagggagactgaggctggtcccctgggggaagggagccatagatagcagctggctgctccgtccaggtgctttcctgactggtctcacccaggatgttagccaaagaaaaccaaagggtttgttctcactgtgtagagggctcagtttgtaggtcagtcagtgttttaagacggtttgacaaataaaaggaagccaccaaacactgtttttaaagtcatctgattgttggagcagaccatacaaagcattgagagaattcaaccaagcctcagggatgtctcgggggtgttggtgcatttgccctcctagcagatcccacctccggtttgtcttgtgttttacacgagacgttcgatgtctgtctgcttcctcagactgagccacaccgagctgccgactctcctttttatacatgttatttattccggactgttcgaggaacgggaggacgtcaatgccctgttctctgctctctgagtacggttcgctctgaatccgaaagttcacctctcccttcaaaatattaaattgaccaccaacattaaacctggataggatgtaataaagaaggaatagccttgcaacactaaaacagagataacataaagaccaaaagaaaactcaaccttgtagcccctaagttttgaacatctttcaaatgtgtgctgagcagagcctggttacatccgaacaagctccctgggatgcccagagggaaggtcgaatgttgatttgttccaggctggcactgcctatctggtgtagctccctcaacctgcagtaaccgaaacagacctgaaaaccaaagccatctatagatgtgtacaccactagagggtagccacggagtgcagatggattctgactaaagttttcaatcttgaatttaaaacttttaaaatcaagcaccacctaggaaggacacttttttttctttttttaaaggtgaaggtgtgtgtgtgtgtgtgtgtgtgtgtgtgtgtgtgtgtgtgtgtgtgtgtgtgtgtgtagctttttaaggaagttggctttcaatccagagcatgagacagtgtgctgtgttcctagcactaggttgacagccctctgctaagctactttgtggtatcaatgacctttgactcatctcaaatccctgggcactcggttttgtcactatgtacagtagagaactagttgaaattaaccatgtgatgttaactattattaataaa

SEQ ID NO: 952 - DNA, 749 bp, Rattus norvegicus
aagctggaagtttctgtatatagtgatcaaaagaagatctatattggggatgacaaccctctgaccctgaccgtgaaggcgcagaatcaaggagaaggcgcctatgaagctgagctcatcgtttctatcccaccgcaggctgacttcatcggggttgtccggaacaacgaagccttagcaagactgtcctgtgcatttaagacagaaaaccaaacccggcaggtggtgtgtgaccttgggaacccgaagaaggctggaactcaactgcttgctggccttcgtttcagcgtgcaccagcaatcagagatggatacttctgtgaagtttgacttgaaaatccaaagctctaattcttttgacaatgtcagcccagtcgtgtcttacaaggtcgaccttgccgttttggctgcagttgagataagaggagtttcaagccctgatcacatctttcttccaattccaaactgggagcacaaggaaagccctgagaccgaagaagacgttgggcctgttgttcagcacatctatgagctgagaaacaatggtccaagttcattcagcaaggcaatcctgaacctccagtggccttacaaatacaacaacaatactttgctgtacattctccattacgacattgatggaccaatgaactgcacttcagatatggagatcaaccctttgagaattaagatgcctgaaaagaatgacacgggagctgagcaaggaggaaggaatcatctcatcaccaa

SEQ ID NO: 953 - DNA, 1059 bp, Rattus norvegicus
atgggcgggaggaggatgcctctctgggcactcttgttgctctggacctcttgtagcttcagtctcccgacagacacagccagctttggacgaatcttgctcaagaaaatgccctcggtccgggaaatcctggaggagcggggagtagacatgaccaggatcagtgctgaatggggtgaattcatcaagaagtcttcctttaccaatgttacctcccccgtggtcctcaccaactacttggatacccagtactatggtgagatcggcattggtaccccatcccagaccttcaaagtcatctttgacacgggttcagccaacctctgggtgccctccaccaagtgtggtcccctctacactgcctgtgagattcacaacctctatgactcctcggaatcctctagctacatggagaatgggactgaattcaccatccactatggatcagggaaggtcaaaggtttcctcagccaagatgtggtaactgtgggtggaatcattgtgacacagacctttggagaggtcaccgagctgcccctgatacccttcatgctggccaagtttgacggggttctgggcatgggcttccctgctcaggctgttgatggagtcatccctgtcttcgaccacattctctcccagagggtgctaaaggaggaagtgttttctgtctactacagcagggagtcccacctgctggggggcgaagtggtgctgggaggcagtgaccctcaacattaccagggcaactttcactacgtgagcatcagcaaggccggctcctggcagatcaccatgaagggggtctctgtggggcctgccaccttgttgtgtgaggagggctgtatggcagtggtggacactggcacatcctatatctcgggccctaccagctccctgcagttgatcatgcaagccctgggagtcaaagagaagagagcaaataattacgttgtgaactgtagccaggtacccaccctccccgacatctccttctacctgggaggcaggacctacactctcagcaacatggactatgtgcaaaaggtgaggctgtga

SEQ ID NO: 954 - DNA, 2462 bp, Rattus norvegicus
tgtgctgttggaaccatggcgcctgtctgcctgtttgcgccgctgctgctgttgctcctcggaggtttccccgtcgccccaggcgagtcgattcgagagactgaggtcatagacccccaggacctcctggaaggcagatacttctctggagccctcccggacgatgaagacgctgggggccttgagcaggactctgactttgagctgtcgggttccggagatctagatgacacggaggagcccaggaccttccctgaggtgatttcacccttggtgccactagataaccacatccccgagaatgcccagcctggcatccgtgtcccctcagagcccaaggaactggaagagaatgaggtcattcccaaaagggtcccctccgacgtgggggatgacgatgtgtccaacaaagtgtccatgtccagcacttcccagggcagcaacatttttgaaagaactgaggtcttggcagctctgattgtgggcggcgtagtgggcatcctcttcgccgttttcctgatcctgctgctggtgtaccgcatgaagaagaaggatgaaggcagttacgacttgggcaagaaacccatctacaaaaaagcccccaccaacgagttctacgcatgaagcttcttcccatgagtgctgcttggacttcatggggagaggagttgaggattgtggacagtggacattggcagagagagggcaccttaatactgacttgtatctccatctctggtcacctttctggtgtcagaagagatatgatcttctactgtgctgcctcagagagagagagagagagagagagagagatgggatggggtgcggagggagtgtccgtgtgtgtgtgtgtgtgtgtgtgtgtgtgtgtgtgtgtgtgtctgtctgtctgtctgagttgccctggcagaaaaatggggttaaacttgttctttcttgaaggcaagcctggaattgggtctttttgttgttgtttcaaatttctagaatagaatgtaggaccagtttagttcctgccgttaacatgtctcatttatgactgcctttattctagaggcaaggagttgggggcaaggagctggaacccgctgcaccttgagatgtgttcacccgagtacttcctcacactacagggtctctgtggtgtatctcggggcattctaggctcagtgacttttgaaattcaaccttttttttttttttttaaatccagggagggtgggactgaagtgctgacagctcatgctgaagtacacttgtagaagatttgtaaaatgtaaggttttttttttttttttttaatggtccattccttcatgggagcgtgtgccctgggctgagagcgtggggatgcacagatgttctttctagaacatattcgttgcaacagctaactttgtgttttcatggttttttatgttttgttttgtttttttgaaaatgagagaagagctggagagatgatttttatgatttttttttgttttgttttttactatttatagcttcagacggggctgcttttctctacctttctgtctttactgtttcccactattttttttttttaatgttctgtgctcttgtttttgaccctggccctttctgaagttgctttatcttaaaaagtagctacagtgttctagcagattccagaatataatgtagggggtagcgggatatttgtgttcttgtaatatatattatccttcctcggttctaggagaatagataaatatatttttttaggatatagaatgatactacaggtctcatgttggctgggtggctgcgtgagtgagttttcgtgcggctgagtaagctgttgccctcttctcttgccctgctcctggtgccttctcgagatcgagctggagtgactgagggtacctgactctaacctcactgtgccttctgccgggggctctgcccaggagcctctgggtttgctttctccaggctctctagatgcacgatccaatacagtgacctcctgtggctgtatcaatcagttcacttgactatgtgattggaaatcattcctctgttgcactggccacacaatttaagtgcctagtcaccatccaccgagcacagagattgaggctggtttagcaggttacggttcagttttgcttgtctccccgggcaagagaaggggacttaggaggaaggtgatgaggtcccagggactcctgtcacccaggactctccctcttacagaggaaagacctagtagcttaaaaggtctgggctgtgtgggggtggggcggtcataccactccctcaaccatgccctatgcctgtaagcccccatcaccacctccgtgcagggtcctagctggctgggtcctcttctagccttgtgcctgctccttttctgtatcccttactctgttgtctgttactgatttttttgataaaaagataataaaacctggtactttctaaaaaaaaaa

SEQ ID NO: 955 - DNA, 1892 bp, Rattus norvegicus
aaactgaccaaggagtatgatcaatcccgtccagcctccgagcctgcagccgtttggtcatggtgagctgcttcagctaacaattgcactgacagtgctcttgagccaagttgcttctgggcggaagtagtccatctagggctcggcctctttaaagaaacagacttctgcaaccttgggactacgtttggggtcgccggctattggacggagcagcgcaattgttagctgaagcagctcaccatgaccaaacggctgcaggctcggaggctggacgggattgatcaaaacctctgggtggagtttggcaaactgaccaaggagtatgacgtcgtgaacttgggtcagggcttccctgacttctcgcctccggactttgcaacgcaagcttttcagcaggctaccagtgggaacttcatgctcaaccagtacaccagggcatttggttacccaccactgacaaacgtcctggcaagtttctttggcaagctgctgggacaggagatggacccactcacgaatgtgctggtgacagtgggtgcctatggggccttgttcacacgctttcaggccctggtggatgaaggagatgaggtcatcatcatggaacctgcttttgactgttatgaacccatgacaatgatggctggaggttgccctgtgttcgtgactctgaagccgagccctgctcctaaggggaaactgggagccagcaatgattggcaactggatcctgcagaactggccagcaagttcacacctcgcaccaagatcctggtcctcaacacacccaacaaccctttaggaaaggtattctctaggatggagctggagctggtggctaatctgtgccagcagcacgatgtcgtgtgcatctctgatgaggtctaccagtggctggtctatgacgggcaccagcacgtcagcatcgccagcctccctggcatgtgggatcggaccctgaccatcggcagtgcaggcaaaagcttcagtgccactggctggaaggtgggctgggtcatgggtccagataacatcatgaagcacctgaggacagtgcaccagaattctatcttccactgccccacccaggcccaggctgcagtagcccagtgctttgagcgggagcagcaacactttggacaacccagcagctactttttgcagctgccacaggccatggagctgaaccgagaccacatgatccgtagcctgcagtcagtgggcctcaagctctggatctcccaggggagctacttcctcattgcagacatctcagacttcaagagcaagatgcctgacctgcccggagctgaggatgagccttatgacagacgctttgccaagtggatgatcaaaaacatgggcttggtgggcatccctgtctccacattcttcagtcggccccatcagaaggactttgaccactacatccgattctgttttgtcaaggacaaggccacactccaggccatggatgagagactgcgcaagtggaaagagctccaaccctgaggaggctgccctcagccccacctcgaacacaggcctcagctatgccttagcacagggatggcactggagggcccagctgtgtgactgcgcatgtttccagaaaagaggccatgtcttgggggttgaagccatcctttcccagtgtccatctggactattgggttgggggccagttctgggtctcagcctactcctctgtaggttgcctgtagggttttgattgtttctggcctctctgcctggggcaggaaagggtggaatatcaggcccggtaccaccttagccctgccgaggctctgtggcttctctacatcttctcctgtgacctcaggatgttgctactgttcctaataaagttttaagttattaggaccctc

SEQ ID NO: 956 - DNA, 1742 bp, Rattus norvegicus
gaattcggcaggcgcaggccaagcaactcggccgtccagcgggtgcaggtgcggaccaccatcaccgcgcgcgcttgcagccaccgtagacaccggtctctggctccctagagcggggcagccacagaacccgaggccatgtaccatgaaaagagtttcttggtctctggggacagctatcctcccccaaaccctggctatcctgtggggccacaagcccctatgcctccctatgttcagcctccctaccctggggccccatacccacaggccgctttccagccctctccctatggtcaaccagggtatccccatggtcccggtccctatcacaaggtggttacccctcaaggacctactcaaggaggctacccaccagggccattacccacagagccccttcccccctaacccctatggacagccaccacccttccaggaccctggctcacctcagcatgggaactaccaggaggaagggcctccatcctactatgacaaccaggacttcccctcggtcaactgggacaagagcattcgccaggccttcatccgaaaggtgttcctggtgctgaccctgcagctgtcggtaaccctgtcgactgtggccattttcacttttgtcggggaggtgaagggctttgtccgggccaatgtctggacctactatgtctcctacgccatcttcttcatctccctcattgtcctcagctgttgcggggacttccggaaaaagcatccctggaaccttgttgccctgtcgatcctgaccatcagtttgtcctacatggtgggcatgatagccagtttttacaacacggaggcggtcatcatggccgtgggcatcaccacagctgtctgcttcacggtggtcatcttctccatgcagacccgctacgacttcacctcgtgcatgggcgtgctcctggtgagcgtggtggtgctcttcatcttcgccatactctgcatcttcatccggaaccgcatcctggagatcgtgtacgcctcgctgggcgctctgctcttcacctgcttcctggctgtggacacccagctgctcctggggaacaagcaactgtccctgagcccagaagaatatgtgtttgcggccctgaatctgtacacggacatcatcaacatcttcctatacattctcaccatcattggccgtagccaaggaataggacaagccccagctcaggtggcatggtgggctcagacccatgcccctgccatgacattgccatctgtgcttccccctctctggttcccagccatggcctggagcagagggagcccctctcgccctcgtgtatgtacactgcaaatacttaacgttcggaccctctctgccacagcatggaaacctttatcccttttgcccttgccaaggggtgacagggctgcatttctgtgccaccttctgtctactcattgttgcatgagccctgtctgccagcccatcccggggtctgggatcaacaccaggtcccaggggagaaggatcataccaagaggtgagggtgcacgtcttccctcctgtcccagctcccctggcatagagtccccatgtcccctcctcaccctgccttctgaggggcttgcagggtggggcctcgttcttgttctgggccccgagaccaagagagggtggcatgtttcaggggagaggctctcttgtgtgctgccattgtaaaatgccaataaaagggtatcttctgctaaaaaaaaaaaccgaattc

SEQ ID NO: 957 - DNA, 2660 bp, Rattus norvegicus
ccggactacctctggaccccctcccctgtccccaacgctgagccgaaaccatgcatgggcgcctgaaggtgaagacgtcggaagagcaggcagaggccaaaaggctagaacgagagcagaagctaaagctctaccagtcagccactcaagctgtcttccagaagcgtcaggctggtgagctggatgaatcagtgctagaactgacaagccagattctgggagccaaccctgattttgccaccctctggaactgtcgaagagaagtactccagcacctggaaaccgagaagtcccctgaggagtcagctgctcttgtgaaggcagaactgggcttcctagagagctgtcttcgtgtgaaccctaagtcctatggcacttggcaccaccgctgctggctgctgagtcgcctgcctgagcccaactgggcccgggagctggagctatgcgctcgcttcctcgaggccgatgagcggaactttcattgctgggactatcggcgatttgtagccgcacaggctgctgttgcccctgcagaggaactagccttcactgacagcctcatcacccgtaacttctccaactattcctcctggcattatcgctcctgcctcttgccacagctgcacccccagccagactctggcccacagggtcggctccctgaaaatgtactgctgaaagagctggagttggtgcagaatgccttctttactgaccccaacgatcagagtgcctggttctatcaccgctggctcctgggtcgggcggagccccacgatgttctatgctgtgtgcatgtgagccgggaggaggcctgtctgtcggtctgcttttctcgtcccctgacagtgggctccagaatggggaccttgctactcatggttgatgaggcacctttgagtgtggagtggaggactccagatggcaggaaccggcccagccatgtctggctctgtgacctgcctgctgcctctctcaatgaccagttgccccagcacacgtttcgtgtcatctggacaggaagtgatagccagaaggagtgtgtgcttttaaaagaccgcccagaatgctggtgccgagactcagccactgatgaacagctattcaggtgtgagctgtcagtggaaaagtccacagtgctgcagtctgagcttgaatcctgtaaggagctgcaggaactagagcctgagaataaatggtgcctgctgaccatcatcctgctgatgcgagcactggaccccctcctctatgagaaggaaacactgcagtacttcagtaccctcaaagctgtggacccaatgagagcagcttacttggatgacctgcgcagcaagttcttgctggagaacagtgttctcaagatggagtacgctgatgtacgcgtgctgcacctggctcacaaggatctcacagtgctctgccacctggaacaactgctcttggtcactcatcttgacctgtcccataatcgactccgagccttacccccagccctggctgctctgcgctgtcttgaggtgctgcaggccagtgacaatgccctggagaacgtggatggtgtggctaaccttccccggctacaagagctgttactatgtaataaccgcctccaacagtctgcagcaatccagcctcttgtctcctgccccaggctagtcctcctcaacctgcagggcaactcgctgtgccaagaagagggcatccaggagcgtttggctgagatgctaccgtctgtcagcagcatcctcacctaggaggccctgcctcatcctcacctttaacttactgggactgaataaagtgtggagaggcccctctaccacttgaccgctgccatgacaacactacctccattaccaccactgttttgaagaaaggaagggaggggctctgtggtgagggtctactgccctgtgatactctctacccagagcctctgtgttcatgtctggtcaggaccacagctggatttgagttcatcatcagttttggggctgtcatgggagcctagcttgagactgggatagaaatcgggctcgggttatgatttgggctgagcctcagaacagctgtctctagctggaagagactgtgaacctttctctcgtgagtctgccaacttcagactttgtgtcctgacccctgcttcattcacaacggaataggctcaggacctcagtgtttgagaaagaatgtgtcagggcatcttgccccacctggttaagatgacaatattggtccttgtggattacattctatggttgaaaagcccttgggaacccttggtcccgtttgatcctcatacactcagggatgggatgattagaacatttgaactgatgaagagactgttctgacccgcccagggttactgagctctgcatgcggaagccagatactaaccacgttgcttcagtgatttagcccttttcctgtttctgtattaatgtagaatgattaaacagaggcccggcctcaactcgccaaggtatttagataggagcctactcctgagttgcatccacaccccaccactcggtgttgtgactttgaaagctgcagggaacaaggcctccagggagtggctcaagggtttgggcactgagtcaaacttggcatagtgagggaagatggtgactgattaaaacgagaagagtgta

SEQ ID NO: 958 - DNA, 1754 bp, Rattus norvegicus
cagtgcaagcgcgcaggcgcgaccggggggggggggcgggctgcgaggagaatctcagcgatcctcagttactgccgcatcctctgccggtcgtcatggctgcctacaagctggtgctgatccggcatggcgagagcgcctggaacctggagaaccgcttcagcggctggtacgatgccgacctgagcccagcgggccacgaggaggcgaagcgcggcgggcaggcgttgcgagatgctggctatgagtttgacatcgtcttcacctctgtgcagaagagagcaatccgcaccctctggacagtcctggatgccattgaccagatgtggttgccagtggtacggacctggcgtctcaatgagcgacactatgggggactaacaggtctcaataaagcagagactgctgctaagcatggtgaggcacaggtaaagatctggagacgatcttacgatgtcccgccacctccaatggagcctgatcatcccttctacagcaacatcagcaaggaccgcaggtacgcagaccttactgaggaccagctaccctcctgtgagagcctgaaggatactattgccagggcactgcccttctggaatgaagaaattgttccccagatcaaggaggggaaaggggtcttgattcctgcccatggcaacagctacgggggcattgtcaagcatctggagggtctgtcagaagaggccatcatggagctgaacctgccaactggtatacccatcgtctatgaactggacaagaacttgaagcccatcaagcccatgcagtctctgggagatgaagagacggtgcgtaaagccatggaagctgtggctgctcagggcaaggtgaagaagtgaaggcgaggaggcggactcctgccctgaacaccctctctccctgcttgttcctgcctcctgcaccctcccctgcacctgccacactgactacatctttaggatcttcagtttaagttgtagctgcagataggacctgtggctcccattctccttttagtattttatccccggcacccactccttcatagaatctagtcagaagaagacctctggggctgcaggctcttggtccatatccagggacggctccctgttacaggagagagttgagtagatagtaattatatcccccttagctctttgtttactaagggtctgcttaggaagaaggtcgggagggactgtatgtggtatgaccaatgaggagagaagctgtggtccagttttgtccctggaacctgtcctgcactcttcccacaattaggtaactgggggcctagtcattccagtggagagtgaaatgaacctcatgccgattaaaaagaccctactttctctctgaccctaaaggacgtcgtggccctagaaggttgggaacagtcttgtcaagtctatgtgtgttaacatttatttttacaaaaataaagtatatatacatatatcagcacaaaagcaacgaggttgctagtggcagttgagagtcctaagtggtcaccagaaaaaaagccattcctcagatcaaatgggataaactccttgtacctcttgctgtgttttggatccctttgccttgttttgtaagaggtgaagccccttgatcatgtccaaggttttgtctttcactgtctgaatcatgtttccagctgcttgaccctactgtgtgggttcagaactcgtttgggcataacaactaagtctctttccagtcagtataataaaggagtgatgtgcaat

SEQ ID NO: 959 - DNA, 1030 bp, Rattus norvegicus
gggcggaaggccgcactgttgccacaatgatttcctgttcttcctttttcaggttgtcgaccatgtgtcaagctgtgtagggaaactgcctggagatggacattctgactgctaatggggacatgggacggcagttacctctgatcacttgcgtggattctcctggagcagaaagacagaagccgccagtcactgctccggatctagcactgggattctgtgctgaagggtctaaaaactcgttttgatttggatctgggagaatgtctgagcaaggagaactaaccccgaccatactggaagaaggccggacagagccagaatctgccccagaaaatggcatcctcaagtcagaaagtctggatgaggaggagaagctggaactgcagcggcgactggcagctcagaaccaagagagaagaaaatccaagtcaggagcaggtaaagggaagctgaccagaagtcttgctgtctgtggaagagtcttcagccagacctggaggggaaagtcaccaggatcagactctctgagaactgcaaacggaaaggaactcaaaagaacttagattaaaacttaacttacaaatgataaaataaaataaaataataaaatccagtaagcacggaagtgctcgatgtccactgaggctctctcttgataaggctgaaccaaatacaccccaagcatcctgtctctatggagacagcttacctctcagctccccaaatgaacctgcctataaataacacaccactgttggctcctaggagatgagaaatagtgtctaagcaccctgaactgtggagaaatgctgctatggccttcgggaggttgttggtttttggtttggtttgtttttttttttttttttttttttaactactgcaaaaccggcccagaagagcgtctgaactggtagcgaatttgatattaaccagctgctgcacctccactctgtgatcccccaaagcttaaagttccagggcccttcgcatcctcttcgttacccttttttttttccttttttaa

SEQ ID NO: 960 - DNA, 1524 bp, Rattus norvegicus
cgcagcctcgcgctcgcttctggggcctggggacaccgccgcgccctgcgaggcagcggtcttcccgcctgccttccctccgtggctccggcgctgcccggtcccctcgggcggcagctgccatgggcaccgacagccgcgcggccggagcacttctggcgcgggccagcaccctgcacctgcagaccgggaacctgctcaactggggccgcctgcggaaaaagtgtccgtccacgcacagcgaggagcttcgagactgtatccaaaagaccttgaatgaatggagctcccaaatcagccctgatttggtcagggagtttccagatgttttggaatgtaccatgtcccatgcagtggaaaagataaaccctgatgaaagagaagaaatgaaagtttctgctaaactgttcattgtaggatcgaattcttcatcatcaactagaaatgcagttgacatggcatgctcagtccttggagttgcacagctggactctgtcatcatggcttcccctccaattgaagatggagttaatctttccttggagcatttgcagccttactgggaggaattagaaaacttagttcagagcaagaagattgttgctataggcacctcggatctagacaaaacacagttggagcagctgtaccagtgggcacaggtaaaacccaatagtaatcaagttaatcttgcctcctgctgtgtgatgccaccagatttgactgcatttgctaaacagtttgacatacagctactgactcacaatgacccaaaagaactgctctctgaggcaagtttccaggaagctcttcaagaaagcatccctgacattgaagcccaggagtgggtgccactgtggctgctgaggtactcggtcatcgtgaaaagcagaggaatcatcaagtcaaaaggatacattttgcaagccaaaagaaagggttcttaactacagctcaagctcacaactcaggggccttgtatttatctggaacataagataaaaattcatgataaaattgagatgtgtaaaaaaaaatctagctctcgcctacaaaaagcgtcactgaggcgtgaatgtggtggtttggcaatgtgttgagtttgagtacctccctggcgtctgcagcagcgcactcacaggaagcattgtattctcttcattaaactcttggtttctaactgaaatcgtctataaagaaaaatacttgcaatatatttcctttatttttatgagtaatagaaatcaagaaaatttgttttaagatatattttggcttaggcatcagggtgatgtatatacatattttttatttctaaaattcagtaactgcttcttactctatacttctataactaagcaattacattacagttgttaagacatactggaagagatttttttcctgttgttgacaaaataatctatctcagagtaactatagcagtctactagtaatgtaaataaaattgattctttgatccatgaaaaaaaaaaaaaaaaaaaaaaaaaaaaaaaaaaaaaa

SEQ ID NO: 961 - DNA, 436 bp, Rattus norvegicus
actttattttggactgtggtacggccaacaagaccactctgtatgcaaaagcccaacatggctgtaactggagatgaaactgatgaggagactgaccttgccccaagtcacatggctgctgccacaggtgacatgccaacttaccagatccgagctcctactactgctttgccacaaggtgtggtgatggctgcctcaccaggaagcctgcacagtccccagcaactagcagaagaagcaactcgcaagcgggagctgaggctgatgaaaaacagggaagctgctaaagaatgtcgacgtcgaaagaaagagtatgtcaagtgtcttgagagtcgagtcgcagtgctggaagttcagaacaagaagcttatagaggagcttgaaactttgaaagacatttgctctcccaaaacagattagtagaaatatttaacta

SEQ ID NO: 962 - DNA, 4557 bp, Rattus norvegicus
cttctacttcagacactgtgcgctctcccggaccgtcgtgcgccgctccccgtcgccttccaggactgggaaaggggagaggaggacggtgccacgtccgacggcctcctgggctgggggcagggtctgccgctcgcccttggcaccagtccctgcgacccatccccgagcctcgccctcctcctccctgctcgaagaggtctccctccttcgcgggatctgagtccctgtcttcatttttctcctagccacgtccctccccgagaagggacgagccgggagcatcatgcgtttcgcctggaccgtgctctttctgggacagctgcagttctgtccccttctccgctgcgccccgcaggccccgcgcgagcctcccgccgcccccggtgcctggcgccagacaatccaatgggagaacaacgggcaggtgttcagtctgttgagcctgggggcgcagtaccagcctcagcgacgccgcgactccagcgccactgccccgagagccgacggcaacgctgcagcacagccacgcacgcccattctgctgctgcgtgacaaccgcactgcctctgcccgtgcgaggactccaagcccatctggggtcgccgcgggtcgtccccggcccgcagcccgccactggttccaagttggtttctcgccgtcgggggccggcgatggagcctcaaggcgcgcagcgaaccggactgcgtcgccacagcctccgcagctcagtaatctgaggccacccagccacgtagatcgcatggtgggcgacgacccctacaatccctacaagtactccgacgacaacccctattataactactatgacacttatgagagaccccggtccgggagcaggcaccgacctggatatggcaccggttacttccagtacggtctcccggacctggtacccgatccctactacatccaggcatccacgtacgtacaaaagatgtctatgtacaacctgagatgcgctgcggaagaaaactgcctggccagttcagcatatagggcggatgtcagagactatgaccacagggtactgctacgatttcctcagagagtgaaaaaccaagggacgtctgacttcttaccaagccgcccccgctactcctgggagtggcacagctgccaccaacattaccacagcatggatgaattcagccactacgacctgctggatgccagcacacagaggagagtggccgagggccacaaagcaagcttctgtctggaggacacttcctgtgattatgggtaccacagacgatttgcctgtactgcacacacacaggggttgagtcccggatgttatgatacttatgcagcagacatagactgccagtggattgatattacagatgtacaacccggaaattacattctaaaggtcagtgtaaaccccagctacctggtgcctgaatcagactacagtaacaatgtcgtacgctgtgaaattcgctacacaggacatcacgcctatgcctcaggctgcaccatttcaccgtattagaaagaagctcaccttcccaaaggatgaagcagtacctggtgtttggacctatgaaaaccgtagattagcttaagtaggaagacttagatattttaaaaggcaaacggaaaaacaacaaagaaggttttgtttggactctttcacaacaaatcacataactggattttgagtgtttaaatcagcattagattggcacattttaaatacttattcatgttgctttatgaagtaatggtgtttcaattctgtgggtgcatagtgggctctttcaaagaattctgaatttcttaccttcttttgaaattatagtgcaaaaagaagaggatattttaatgaatgagccacaatttgaactgattactttctaaattgccagacccatgagacaatgatgatgggtttgtatttgcctcaacatagattcgctttttaaaaagggtgttcctattgtataggcaaaaatggatacacttggtgctgaggaagggtcaaatactaactattgttgtcacgaaatataggtctacagcagagagatggtgagtatatattcagatagttacatccctatataaactatgtttacattttagatgcttttctttctgttaattgcttaatctcactctgacttgaggtacaacttctgttttggaatgaattagataattccagattctggtttgataattgttgacattcccccatgctactttttctgagggcagaaacgtctaatgtgacgactcttcacattaccattacgaggatacacagcacagcgaaatcattccgatgacaggtgtgatagatggagagctaacatgcaactgccgagtgtttcactgttagccagaactaagtcactgcccacacagcaattacaccatgaatctctaacatcacaaccttctttcaaatactgtaaaaaaaaaaatactggaaaacctttttagatttgtttcaatctaccacgcttctgaaatgttcagctattaaggggaatgtcaatatatatatacagcccaaattagcgaagcccaaattagggaagcacatagcatggcatacttgagaggttggcaaacaagagggaagcaggtactttctgcaaaaacagggactgtgcgccacaatgagaccgctgtgaccttacttcaaactgtgaaactgtgtgcagcagtaggatttggagtcttaaattcagaaggagcagaaagaaagagagttagacgtttgaattcctggtgcttatgctgacgttttctctcatttgccagcattaaaatctcaagtaaggtgtctcctgtgccaggacgtgtcaggtagacctttctcagtgagctggaatcctgccttctgtgtcatagagttgtaagagcagcagtttctacccatcatgctgtgtactcactgctgcagagcaagtgggaggggccagagatgggccgtccccaggggcggatagcgcggtacacttaattctcttctgcctgaaagcacacttccccgtaagcgaatacagacagaactttgattgagctggtatctgaccgataggattgcttctttgatgtacctctttgacctagctagcatttcagctttgatactgcagaacgatcttttcaaattataatcattctgatagagatatcttaatagacgtgcttttaaaaacaaaacggaaactactgtcagtatgaatactgagccagactggcattcatagatttaacaacttgtatttctaagattcttaactctataaaagtaatatggcttttagatatataggataataatttcagtgagaccgttatctctttactcaacattatgttagggacagtataagccaagcacttacctgttacacattggagactaaaacgactgcccccaaccttagtaagtatgaaaactagactcacattatttcatttttaactgctaaaagtatgtctatagaatttaaaatttaagcactactatttgtcctggccacatttttcaaaaattaagttaaaagttattaattatatacaggtgtgtatttctaataattaaaatacctttcaaatccatggaatgtctgccttttaaatgtaatttgggcttttttgtttgattctttttcacttaactagctgtttatttgtaaacatttctttccacgatttaaaaacacttccaatcggctttacttcctgatttagcacttcctattttgacccttgggcatctgttcttcgtttaattggtgtagaataatgataaaaatcccaagctagtctaaccaaactgcattcttaagagtactaagtgggaatgatgcaaagttcatcaagaattgaaaagaagccggtctttgcactaaggaagacagcataattaagtcttctcgttgccatctgagtaatatcatgatatggggaccgcagaatccatctccggtgggatgatggtatagctttcctagttccagaaaaaatctccttcacattttatataataatttaatcacaatgtccatcgaattcttccttaggcattctttgtaacagtagtgtgctgctctttaaaatattaacctctgacacatgtgtgaacctcattccctgtggtcactaaaatttcttccccactgagcatcaatctttagcagattttaggaaaatactgaattcttagtcaggaaatattttaggaataatcttgctaacagtatattaagtaataaaattacccactctatgtgtgtttcattttttttaatttacatagacaatggtttttataaagcaatgatttcaatttttcccagctacccaaagtcctggttaatttgtgaacacaaattttgttagccttcaagtttaaacggtgctgaattgtcttaacttgaatgtaaaaatggattaaggcttatctcatgggacacaaacatgtcccatatgactgcttgctgcgtactaggggacatgccatttggtgttaaattgtctataataaagttcggtttctcccaaaaa

SEQ ID NO: 963 - DNA, 1403 bp, Rattus norvegicus
gaattccggggcgctgagagtccgtgagctgcccagcgcctaaggcctggcttgtagctccctaccccgggctgccggccccgaagtgccggctgccaccatgaatagtgaggagcagtactacgcggccacacagctctacaaggacccgtgcgcattccagaggggtccggtgccagagttcagtgctaatccccctgcgtgcctgtacatgggccgccagcccccacctccgccgacaccccagtttgcaggctcgctgggaacgctggaacagggaagtcccccggacatctccccatacgaagtgcccccgctcgccgatgacccggctggcgcgcacctccaccaccacctcccagctcagctcgggctcgcccatccacctcccggacctttcccgaatggaaccgagactgggggcctggaagagcccagccgcgttcatctccctttcccgtggatgaaatccaccaaagctcacgcgtggaaaagccagtgggcaggaggtgcatacgcagcagaaccggaggagaataagaggacccgtacagcctacactcgggcccagctgctggagctggagaaggaattcttatttaacaaatacatctcccggcctcgccgggtggagctggcagtgatgctcaacttgactgagagacacatcaaaatctggttccaaaaccgtcgcatgaagtggaagaaagaggaagataagaaacgtagtagcgggacaacgagcgggggcggtgggggcgaagagccggagcaggattgtgccgtaacctcgggcgaggagctgctggcattgccaaagccaccacctcccggaggtgttgtgccctcaggcgtccctgctgctgcccgggagggccgactgccttccggccttagtgcgtccccacagccctccagcatcgcgccactgcgaccgcaggaaccccggtgaggaccgcaggctgagggtgagcgggtctgggacccagagtgcggacatgggcatgggcccgggcagctggataagggaggggatcatgaggcttaacctaaacgccacacacaaggagaacattcttcttgggggcacaagagccagttgggtataccagcgagatgctggcagacctctgggaaaaaaaaagacccgagcttctgaaaactttgaggctgcctctcgtgccatgtgaaccgccaggtctgcctctgggactctttcctgggaccaatttagagaatcaggctcccaactgaggacaatgaaaaggttacaaacttgagcggtcccataacagccaccaggcgagctggaccgggtgcctttgactggtcggccgagcaatctaaggttgagaataaagggagctgtttgaggtttcaaaaaaaaaaaaaaaccggaattc

SEQ ID NO: 964 - DNA, 2537 bp, Rattus norvegicus
gcctcactcgggtggtggcagtgttcaagaggactaactcttgtcatccggattccagttcgattcctcggatccaattaggaagacactccatcatgcgattggagtcctcgtcgtggcccagagatagaagacggacggggaaggggagacctaaccagatagctaggtgcctcctgaagaactaccatgtctgagaatagtacattttccacagaagacagcagcagcagcagctataaaccccacgcctcaaacctccgaagggcagggaagaaatgctcatgggcttcctacatgaccaactccccaacactcattgttatgattggcttgccagcccggggtaagacttatgtgtccaagaaattaacacgctacctgaactggattggagtacctaccaaagtgtttaatcttggtgtatatcgacgggaagcagtcaagtcctataagtcctatgacttctttcgacatgacaatgaagaggccatgaagatccgcaaacagtgtgccctggtggcactggaagatgtgaaggcctactttactgaagagagtgggcagatcgcggtgtttgatgccaccaataccactcgggagaggagggacatgattttgaactttgccaagcagaatgccttcaaggtattctttgtggaatctgtgtgtgatgatcctgatgtcattgctgccaatattctggaggtaaaagtgtcaagccctgactaccccgaaaggaatagggagaatgtgatggaggacttcctgaagagaattgagtgctacaaggtcacttaccagccccttgacccagacaactatgataaggacctctcgttcataaaggtgatgaatgtaggccagaggtttctggtcaacagagttcaggactacatccagagtaagattgtctactacctgatgaacatccatgtccatcctcgcaccatctatctgtgccggcacggagagagcgaattcaatcttttgggaaagattgggggtgactctggcctttcgttgcgaggaaagcagtttgctcaggctctgaagaagtttctggaggaacaggagatccaggacctcaaagtgtggacaagccagttgaagaggacaattcagactgctgagtctcttggggtgacctatgagcaatggaagatcctaaatgagattgatgctggcgtgtgtgaggagatgacttattcggagatcgaacaacggtatccagaggaatttgcacttcgagatcaagagaagtatctgtatcgatatcctggtggggagtcataccaggacctggtgcagcggctggagcctgtgatcatggagctggagcggcaaggcaacgtcctcgttatctctcaccaggctgtcatgcgctgcctcctggcctacttcttggataaaggcgcagatgagttgccgtacttgaggtgccccctccacatcatcttcaaacttactcctgtggcctatggttgcaaagtggaaacaattacactgaatgtggaagctgtggacacacatcgtgacaagccaactcacaacttccccaagagccaaacccctgtaaggatgagaaggaacagctttacgcctctgtccagttcgaacacaataaggcgtccaagaaattacagtgttgggagccgacccctcaagcccctcagccctctccgtgccctggatatgcaagaaggggcggaccagccgaagacccaagtcagcattccggtggtgtgactgtgtgtttcctccagctatggcctcttgcccttgtcactaatcaatcaagaagtcacttaactgtaccccactcctgtcccagtgttaatctgaacatggaatctgagctcagacgtgtgcagagcagccattctctagtgtaaacacctcagccgggggcaggatggcaagttgggtttttagatgagatgatctgacagaagaggagccaagcatgagtcatagacttggttcttctgtttcctgatgtctgaccccagtctttgtgaagtgtgtgtgtgtgtgtgtgtgtgtgtgtgtgtgtgtgtgtgtaagggagggttgctgggaggagtgctgagtagagtgagatgtagcaacctatctgtccctcatgtgtgtctttaaatctgtcttcatatccttaacttccctgtcctatagcttctctttgggctgtctggcgtgatgcatgacattgtgatgtcttaaagtaagggactgttgatagctatctaagccccattggtgctgtctgcacgctggtctgggtctgcactgggagagtcttttcccttcccttctcccttcctctccagccaggtccagcaagggtcagcccaggctacagaacatctacagaaagccctggagtttgcaaatggacatagggaagtggagaatgtgctggctaagcatagacgcccctcaatggcatccctcactttgctctcctgatgtgaggctgaggccagacctctccgaggaactggatctaccaaaaagcttggcatgccagcatccct

SEQ ID NO: 965 - DNA, 512 bp, Rattus norvegicus
cacatttgcagcgcgcccttctgtcaagaacctgctccgacgtcagccgaggccaaccgtgtgctgctgaaatgggctctgagctggagaccgccatggagaccctcatcaatgtgttccatgcccactcgggcaaggaaggggacaaatataagctgagcaagaaggagctgaaagacctgctacaaactgaactctccagcttcctggatgtccagaaggatgcagatgctgtggacaagatcatgaaggaactggatgagaatggagatggggaagtggacttccaggagtttgttgtgctggtggctgctctcacagtggcttgtaacaacttcttctgggagaacagttgagcacagtctcagtaggcagcgccctccctcttttgctcctcatcccacctgtatctccctatgtacccatccttgcccaggctcaacatgcaccaaaggcgaaacagtagcagtccagatctgccactagttttaataaagcttctctctcacgaa

SEQ ID NO: 966 - DNA, 3687 bp, Rattus norvegicus
ttctgttactgcggctgtgtggtctgtcatgagttgagacgggatgtgagggtttagagaaactgccgctctgaagcctgagcctctgctcagtgatcttcctgccagagggactggacaagatttcttctgcatgattggaaacttggacctattagcacgtcatctacccagagaagcaggcagcgtgacagagtgaagaggggaaggaactactgcagaaacaagcaaacagcacaaaaggtggaggctggaaagatgttttagaaagtctctgtgtcagagaagcttcaagccactgaagatggagaatgaaaccgtcagtgaactgaaccaaaccgagctcccgccgcaagtagccgtggccctcgagtaccaggtggtcaccatcttacttgtggtggttatctgtggactgggcattgtgggcaacatcatggtagtcctggtggtcatgagaacgaagcacatgagaaccgctacaaactgctacctggtgagtctggctgtggcggatctcatggtcctggtggctgcaggcctccccaacatcaccgacagcatctatggttcctgggtctatggctatgttggctgcctctgcatcacgtatctccagtacttaggaattaacgcatcttcatgctcaataacagcctttaccattgagaggtacatagcaatctgccaccccatcaaagcccagtttctgtgcacattttccagagccaaaaaaatcattatctttgtctgggcctttacatccatttactgtatgctgtggttcttccttctggatctcaatatcagcacctacaaagatgctattgtgatatcctgtggctacaagatctcccgcaactactactcacctatttacctaatggactttggcgtcttttatgtcatgccaatgatcctggccactgtgctttacgggtttatagctagaatcctcttcttaaaccccattccttcagaccctaaagaaaactctaagacgtggaaaaatgactcaacccatcagaacaagaatatgaatttaaacaccaccaacagatgtttcaacagcaccgtttcttccaggaagcaggtcaccaagatgcttgcagtggttgtaattctgtttgcccttttatggatgccctacaggactcttgtggttgtcaactcatttctctccagccctttccaggaaaattggttcttgctcttttgcagaatttgcatttatctcaacagtgccatcaacccggtgatttacaacctcatgtctcagaagtttcgtgcagccttcaggaagctctgcaattgcaagcagaagcccactgagaaagctgctaactacagtgtggccctaaattacagtgtcatcaaggagtcagaccgctttagcacagagctagatgacatcaccgtcactgacacgtatgtgtcaaccacaaaagtatcatttgatgacacctgcttggcctccgagaagaatggacccagttcttgtacatatggatattctttgactgccaaacaggagaaaatatgaacttcctcaagaataccttgggctggtattaataaaggaaatctttcaaaaaattcaatgtgactcaaaaagatccaactgatcgaaggtcttcattcagaagtcagtaagaacatcgtgatacttaaatggtacagggtggcacaataaggaagcaaacatctaatccctagccatgaggacaagccactcctgttttgatatatatatatacaaattactggcatgcttttccttaatgtgtctctctttctcaaaataactgttatttgccagatgactctgaacacatcctggaaaccaatttgttctgagcctccacatatgtccttcaatacccttgaataccaaataattctgaataggcaagttaaacagaaaatcccatggaggacaagttcatttcatgtttgtatccaagaaattgaactaagatgctgagctcaacattgactttctcttgaatgaatgaacgaacgaacgaaagaatgaatgaacatgaataagtaaatttatgaatctccaactaagaaatataacgtaaaatcttcatgatgcctgatttcctcatagatttgtttacaaatataaaacttgtttgccttttgtttttatcatcttaaaccattctcttggcttattaaaatgtactatattttgtcagatcatggtcaccaccatctctgtgtatatattatgaatacaaagttcaatagtactctcaaatctctcacctaatttaataatgatcaagattattacatgtatgttcagagaataacaacatactatcactgacatgtgaataaaattaaatgtgcagagtacatggtaggaagagaagttatatgatttcagattacaaaccttagaattcctcattgggaaaagaatatcaggggggtgctagagtaattagaacaacctcataggaaagcttgaatttcttataagaatagacttggcttagataggaaaagacaagtgatgtaaggaaagagaggtgagtaagggtaggaggaaaagaaacaaactctaggtgtaatggataatgtgtccagttaagtgtgactcattggggattgatcaaggcaagcaactagaagaaaggaaagaagggaaataaagtatttcctgattattgtatttgttgaggaaatagtcagccagacaggtggtagatgtgtatattagtaagctgtcatgtattttctaaacattgtaaatttcacttattatctataaaaatgtagtatgctatttgtctcctaagtgttataattctgtaagtatcctaaagtcataatttccaggtaaaaactaattgtatatgtgtatatcttttctatattgcactgttatcatatatgggatatatttatttatgtatatatgattcagaggtccttaacagccatgaagttatccagttatgctcaccgtagagatccaagctagctcataggcccttcatatgcctaagcatccatattaaatgagaaactgataagcagtgacaagcttctaatgccctcaccctgttgacttcgatgctgcttatatcgtgctcctgaatgcttggtttcttacaacatgcctctgaatgttttggtttccttttaccatttgtagagagctgtatactcactcatctcattgcttggagatcaatcattgtgtccgtgtggaaaaataatctcctttaagaaagtgcagtattatgtgttctctctgcaatgggaaactattactgtatgtgtatgcatgcacaataaagtatcaaactgaaagacccccccccctttttttttttttttttttttttttttttttttggccatagaaacgtctttattgaagaggacaggagtcatgctgagtttagggacatgcagtgaaggggcagtcgtgagctgtccttggtggtcaggccccaggtctgctctggaccacggggccctcaggttctccctcaggctgttggtctggcccaggtgctgtgaagtcctttggggccaatgactcagatttagtgtcttggacctgtgaccagaaggtagattgaagtagggactccatgatttggggtcctgttagagcctggggccctgcacatattagttatcagagatttggaacttgga

SEQ ID NO: 967 - DNA, 1178 bp, Rattus norvegicus
acattaaccaactgtttagcaactcaggcatgactttgcatttttcttctaatctttcatagaaatttctggccactggacactgtgggagcagcttttaccttattggactatctccccttaagtgggaagggcttagtcaaatgcagtaaagagctataaaacaccgagaactcttgatgtgttgtgaaacttagagggagcagctttttaacaagagaactcaagcaattgctgccatgccggggaagccagtccttcactacttcgatggcagggggagaatggagcccatccggtggctcctggctgcagctggagtagagtttgaagaacaatttctgaaaactcgggatgacctggccaggctaaggaatgatgggagtttgatgttccagcaagtgcccatggtggagattgatgggatgaagctggtgcagaccagagccattctcaactacattgccaccaaatacaacctctatgggaaggacatgaaggagagagccctcatcgacatgtatgcagaaggagtggcggatctggatgaaatagttctccattacccttacattccccctggggagaaagaggcaagtcttgccaaaatcaaggacaaagcaaggaaccgttactttcctgcctttgaaaaggtgttgaagagccatggacaagattatctcgttggcaataggctgagcagggctgatgtttacctagttcaagttctctaccatgtggaagagctggaccccagcgctttggccaacttccctctgctgaaggccctgagaaccagagtcagcaacctccccacagtgaagaagtttcttcagcctggcagccagaggaagccattagaggatgagaaatgtgtagaatctgcagttaagatcttcagttaattcaggcatctatggatacactgtacccacaaagccagccttcgaaagctttgcaacaatcgcatattttgactaaatgttgaccctacttattgggaggccaacacgttttctaatgcttctgtgttaattcatatagacatgactgatgaggaattgctgggatgctatttggttgtagttaaaatttgaaatcatgatcacttcctcagatattactttgaatctcaataaaaacttcgcaagcttcttaaaaaaaaaaaaaaaaaaaaa

SEQ ID NO: 968 - DNA, 1656 bp, Rattus norvegicus
  misc_feature (1)..(1656): n = a or c or g or t
cgcctcttcgcccccttgacaaagaggacagaaagtttgcgcgggggagcgggccaggtgaggaggggcgtgccggcgccagcccgcgccccagcagccggacccaggcccctagcgcgcccgccatgggcgccgcggcccgcagcctccggctggcgctcggcctcctgctgctggccacgctgctgcgcccggccgacgcctgcagctgctccccggtgcacccgcaacaggcgttttgcaatgcagacgtagtgatcagggccaaagcagtgagcgagaaggaggtggattccgggaatgacatctatggcaaccccatcaagaggattcaatatgagatcaagcagataaagatgttcaaaggacctgacaaggacatcgaatttatctacacggccccctcctcagcagtgtgcggggtctcgctggacgttggaggaaagaaggaatatctaattgcagggaaggcggaaggagatggcaagatgcacattaccctctgtgactttattgtgccctgggacacgcttagcatcacccagaagaagagcctaaaccacaggtaccagatgggctgcgagtgcaagatcacacgctgccctatgatcccatgctacatctcctccccggatgagtgcctctggatggactgggtcacagagaagagcatcaatgggcaccaggccaagttctttgcctgcatcaagagaagtgatggttcttgcgcgtggtaccgcggggcggcacccccgaagcaggagtttcttgacatcgaggacccgtaagcaggctgacagagccccctgtggccaattgaaaagcctctgagggttcagactggtccagctttgacatcccttcctggaaacagcatgaataaaacatcaatcatccaagtgggttcacgctagtgtgattctgcccccccacccccattttccctanacatggtagngggtctagagggacaggcgggccagggtncctgccataccccctccctctgncggcctgagcactgtgtgtctcagtctttgatccttggtacagcaggagtagagcacaggctttaccaggcctctctggccctgttgcgtcagcagacagcagcattaagggtcccctagcaccgttagggcagagcctgggaacgtgcattttgcagaaactcttgaaggttgttataagactgtgtagccggcctaccaggtccttttcatcctgagagggtcatgtccctcattttctgcagtggccatccctctggcccaaggcccttgcaaatgctccccatccctcctgcacccagtctccctcaggtctaagaattgccctccaaccagtgtttcatttgcctaggagtcccagtcagccctacgaacccacagacgtccgtgaatggaagccctccctgagccgtgtttctggcttcatatttcttccttcctctctcttcccctgtctctacacaccccctcagtggggatctgtgaggtctcatgctgagggcaggaacctgtggtgaggggtgcttggctgtcctcgtaatcactctcaaggttcccaagcttcttcacccccttccaagcttcaggcacctggggtgagcagcacagctcatctctctgtcgcgttatgccctcccgctgttgg

SEQ ID NO: 969 - DNA, 551 bp, Rattus norvegicus
gggtcacgtagtcaggtcccagacttgggtcacaccgcacttaacaccgtcctccggccgtcgttcgcagtctctccgccaccatgcctatgttcatcgtgaacaccaatgttccccgcgcctccgtgccagaggggtttctctccgagctcacccagcagctggcgcaggccaccggcaagccggcacagtacatcgcagtgcacgtggtcccggaccagctcatgacttttagtggcacgagcgacccctgcgccctctgcagcctgcacagcatcggcaagatcggtggcgcccagaaccgcaactacagcaagctgctgtgcggcctgctgtccgatcgcctgcacatcagcccggaccgggtctacatcaactattacgacatgaacgcagccaacgtgggctggaacggttccaccttcgcttgagcccgggcctcacttacctgcaccgctgttcttcgagtcttgctgcacgccccgttctgtgtttatccacccgtaatgatggccaccttccggtcgggagaaataaatggtttgagacca

SEQ ID NO: 970 - DNA, 742 bp, Rattus norvegicus
tttttttgtgccactgcttcctctctagccgtgagactccagctacttcactatgcgacttctcaccctctccggtttgttcttcatgctgttcctctgtctctgcgttctctcctcagaagggagaaagcgtcctgccaagttcccgaaactcaggcctgctgtcatctatctcctagatccaaaccaataactggaaaggaaaccacacaagaccctgcagaccatgcagaaagctagaatccaattcatggggtggtgcctggggctctcccacagatatagggcctcccgaagctggcctccaccgagatgaaacgttgatgtccagttatggagacaaccttctggcccctaccaaccttcatggccagaaagctgtgacaccagaatgtttcacttcagacagctgaaggattacagaattccaagccctcgttccaaaggtgcaaccaaccttcagagtcactatgatccagggtcagcccacaagtcttcatggctcctgcagagtaaaagtccaagattccatccctgggagctacagattcagagacttccaagctgactggcgaacagagtagcaagacttccttgtgatcagatgagattacagcatcttaggaaccctcggacacccccaaacccatagcatttaatcaacgggatatgaaccaactcctgtaacttcctaatgtaatcaccaggagaacaccaaaaataataaatcataaatcaatgt

SEQ ID NO: 971 - DNA, 2550 bp, Rattus norvegicus
gaattcggcacgagcttcttcccagggatctgagaattgctctcacacaccaacccagcagcgtctgtggagaaaactctcacgagcaactcttttaaaataccgtcatttcaaaccgttgtggtctttaagcaacaacaggggggaaaaaaaacccaaaacaacaaaaaccaaaaaaaaaaaaaaaagccaaacaaaactcttgacaggagctttaacagcgacgaaagagaggatgcctcttaaaggcagaagactttaactaggggcgggcgagcagatgtgtgagatcttctattcaaagagtggacatatagcccagttttcagagccacgtattcgagccccgtgggatccggaggctgccaaccagctccagcatgcagaacagtcacagcggagtgaatcagcttggtggtgtctttgtcaacgggcggccactgccggactccacccggcagaagatcgtagagctagctcacagcggggcccggccgtgcgacatttcccgaattctgcaggtgtccaacggatgtgtgagtaaaattctgggcaggtattacgagactggctccatcagacccagggcaatcggaggcagtaagccaagagtggcgactccagaagttgtaagcaaaatagcccagtataaacgggagtgcccgtccatctttgcttgggaaatccgagacagattactctccgagggggtctgtaccaacgacaatatacccagtgtgtcatcaataaacagagttcttcgcaacctggctagcgaaaagcaacagatgggcgcagacggcatgtatgataaactaaggatgctgaacggacagaccggaagctggggcacccgccctggttggtatcccgggacgtcagtaccagggcaacccacgcaagacggctgccagcaacaggaaggacagggagaaaacaccaactccatcagctccaatggagaagactcggatgaggctcaaatgcggctgcagctgaagcggaagctgcagagaaatagaacatcttttacccaggagcagattgaggctctggagaaagagtttgagaggacccattatccagatgtgtttgcccgggaaagactagcagccaaaatagatctacctgaagcaaggatacaggtgtggttttctaaccgaagggccaagtggagaagagaagaaaaactgaggaaccagagaagacaggccagcaacaccccgagtcacatccctatcagcagcagtttcagtaccagtgtctaccagccaattccacagcccaccacacctgtctcctcctttacatcgggttccatgttgggccgcacagacaccgccctcaccaacacgtacagtgctttgccgccgatgcccagcttcaccatggcaaataacctgcctatgcaacccccagtccccagtcagacctcctcgtactcctgcatgctgcccaccagcccttcagtgaatgggcggagttatgatacctacacccctccgcacatgcaaacacacatgaacagtcagcccatgggcacctcgggaaccacttcaacaggactcatttcacctggagtgtcagttcccgtccaagttcccggaagtgaacctgacatgtctcagtactggcctcgattacagtaaagagagagaaagagagagaatgtgatcgagagggggattgtgttcactcagccaatgactatgtggacacagcggttgggtattcaggaaagaaagagaaatggctgttagaagcacttcactttacaactgtgtcctatactggagcccgggaatggactagaaaccaggacctttgcgtacagaaggcacggtatcagttggaacaaatcttcattttggtatccaaacttttattcattttggtgtattatttgtaaatgggcatttgtatgttataatgaagaaaagaacaacacaggctgttggatcttggatctgtgttggctcatgtggttgtttaaaggaaaccatgatcgacaagatttgccatggatttaagagttttatcaagatatatcgaatacttctacccatctgttcatagtttatggactgatgttccaagtttgtatcattcctttgcatataattaaacatggaacaacatacactagatatatgtaaaaaatatctgttggtttttccaaaggttgttaacagataaagtttatgtgcaaaaaagggtaagatatgaattcgaggagaagttgatagctaaaaggtagagtgtgtcttcgatataatccaatttgttttatgtcaaaatgtaagtatttgtcttccctagaaatcctcagaatgatttctataataaagttaatttcatttatatttgacaagaatactctatagctgttttatacacattttcatgcaatcatttgtttctttcttggccagcagaagttaattgttcttagatatagctgtattactgttcacagtccaatcatcttgtgcatctagaattcattcctaatcaattaaaagtgcttgcaagagttttaaaaaaaaaaaa

SEQ ID NO: 972 - DNA, 3257 bp, Rattus norvegicus
ggcacgagcgctgctcaatggcggaaaagccgctggtactctgaccgcctggtcccccctggcagttgcgggggagtttcctgccggcgcggctggagtctctgtttctctgtgtccggtggctggaagatgctccagagagatcaggctgcggcggaggaggtggcggcggccgagtcggcagcggcgctgggttggagagaaggcggcggcggcggcgtgaggggccggacggtgtaaacagctcgggcggcggcggtggccgagcccccgagggcgaagcggcggcggaggcggtgtcgcgtctcgggagaaagccgggggccgcgggcggctgtgcggcgggcaagcccgcgagaccttgccttccaccttcgccccagattcgttactaaacatgggtgcatttttggataaacccaaaactgaaaagcacaatgctcacggtgcagggaacggtctgcgttacggtctgagcagtatgcaaggatggagagtagaaatggaagacgcacacactgctgttgtgggaattcctcacggcttggaggactggtcgttttttgcagtctatgatggtcatgctggatcccgagtggcaaattactgttcaacacatctattagaacacatcactaccaatgaagactttagggcagctgacaaatcaggctttgctcttgagccgtcagtggaaaatgttaagactggtatccgaactggctttttgaaaattgatgaatatatgcgtaacttttcagacctgaggaacgggatggacaggagcggctctaccgcagtgggcgtgatgatttcaccgacacacatctactttatcaactgcggtgactcgagagctgttctatgtaggaatggacaagtctgcttttctacccaggatcacaaaccttgtaatccaatggaaaaggagcgcatccaaaatgcaggaggcagtgtaatgatacagcgtgtgaatgggtcgttagcagtgtctcgtgctctgggggactatgattacaagtgtgttgatggcaagggccccacagagcagcttgtttctccagagcctgaggtttatgagattctaagagcagaagaggatgaatttgtcgtcctggcttgtgatgggatctgggatgtgatgagcaatgaggagctctgtgagtttgttaactctaggcttgaggtgtcagacgacctggagaatgtgtgcaattgggtagtggacacttgtttacataagggaagtcgagataacatgagtattgtgttagtttgctttgcaaatgcccccaaggtctcagatgaagccgtgaaaagagatttagagttggacaagcacttggaatcacgggtggaagaaatcatgcagaagtctggagaggaaggaatgcctgatcttgcccatgtgatgcgcattttgtctgcagaaaatatcccaaatttacctcccgggggaggcctcgctggcaagcgcaatgttattgaagctgtttatagtagacttaatccaaacaaagacaatgatgggggcgctggcgatctagaagactcattggtagccttataaccttctaaatgcttttgattctgaaaattgggggaaaacttttaatcatattttcttcaatacaaggggaactattcttgtgaattcccactgttttgtggtatgagcagaagccattagcatttcccaccatttgctcatgtttgtacttcccagtaatcgccactcttagcactgcctggactcaacagtattctcgccagcctcaggcctctgcttacaactgtattgaatttttggccctagaaaaacaaaatgaccctacaaatcaacaagtgtgcctgaggtgcatgggaatatagttagctatactctgaagatacgttaagggtttgtttgtttggttgttttttaaaagcaaaacaaaacaacaacatagaagcatgtaagagtaaaggattgcaagagaagttcagtttttcagtttactaagttggaagcctttcgttagttctgtggcttggaatttcatttgagcaatatactataggatatgtatttattattaattgttatttaatttttttccaatttacttgtattaccaaattgggttctccaataatgtaacattgccttgcttcaagatccattgtttggcaataatataaacccttaaagatttccgcatgtgtctgctacatcgttcagatcttactagaagatcttttgaaaccaagtgagttaatttaaggctatttataatttgctttgtcatcttactggcttcgcattattttaattgatgagatttacctttataatgtaaattgtaatcttcttgttttacatgtggatttctatagttttaattttttcagcttttaagatacaagttttatgtaatttggtataatttttaactgtttatgttattttaaaagctcagaatatcacatcaaaatactataaatacattttaaagtatctattttagatctaaggaaatacagagatattttcatgggttcagtaacctttcattttataacattgggcacggtacagagtggctgtcacatcggtacttaaattatttagttctatttttacaataactttaaattttttaagttttgcatgtattgaatttagtgctgaacatgaagagtaaactatttaccaaaaagaagttcctggagtttggagaagtaacgaatgtatccatctgtacatgatttacatgttgtggatgctttgtaaacatttccccatgttttaattgtgtttcagcaggttgtaattgcctctgtgtgtagctgaacatgagtcattatctggtcctgtatgaaatggaatgtatggtattttctgtatcattttcctgaggctgtgtttggggagccacacattcgaatacagttttcctgatcacttgatttcttgtgcacctgatttttgctctcaaaggaattactgccacaatatattttatttattctttagattttagccttgtcagttgaagtgcttcacatgatggtgttaaaaactacttgtccctttactgggggtttgggggttgttaaaagatggggaggaagaatgcaaatgggtcattgttaacctgtccccactgatcccacctgtactcatagtcccttccaggatggtattctgatgtttcctacaatacggtgaccataggcaacttgttacctgaataaaggatcgattttaaacagcc

SEQ ID NO: 973 - DNA, 2275 bp, Rattus norvegicus
ggcggcggttactatggcggagtcggccggagcctcctccttcttcccccttgttgtcctcctgctcgccggcagtggcgggtccgggccccgggggatccaggctctgctgtgtgcatgcaccagctgcctacagaccaactacacctgcgaaacagatggggcctgcatggtctccatctttaacctggatggcatggagcaccacgtacgcacctgcatccccaaggtggagcttgtgcctgctgggaagcccttctactgcctgagttcagaggacctgcgcaacacgcactgctgctatattgacttctgcaacaagattgacctgagggtgcccagtggacacctcaaggagcctgagcacccctccatgtggggccctgtggagctggtcggcatcattgccggtcctgtcttcctcctcttcctcatcatcatcatcgtcttcctggtcatcaactatcatcagcgtgtctaccacaaccgccaaagactggacatggaggacccctcatgtgagatgtgtctctccaaagacaagacgctccaggatctcgtctacgatctctccacttcaggatcgggctcagggttacccctttttgtccagcgcacagtggcccgaaccattgttttacaagagattatcggcaagggccggtttggggaagtatggcgtggccgctggaggggtggtgatgtggctgtgaaaatcttctcttcccgtgaagagcggtcgtggttccgggaggcagagatctaccagactgtcatgctgcgccatgaaaacatccttgggtttattgctgctgacaataaagacaatggcacctggacccagctgtggcttgtctctgactatcacgagcacggctcactgttcgattatctgaaccgctacacagtgaccattgaggggatgattaaactggccctgtctgcagccagtggtttggcacacctgcatatggagattgtgggcactcaggggaagcctggaattgctcatcgagacttgaagtcaaagaacattctggtgaagaagaatggcatgtgtgccattgcagacctgggcctagctgtccgtcacgatgctgtcactgacaccatagacattgctccaaatcagagggtgggaaccaaacgatacatggctcctgaagtacttgacgagaccatcaacatgaagcactttgactccttcaagtgtgccgatatctacgccctcgggcttgtctattgggagattgctcggaggtgcaattctggaggagtccatgaagagtatcaactgccatattatgatttagtgccctctgacccttccattgaggaaatgcgaaaggtcgtctgtgaccagaagctacggcccaatgtccccaactggtggcagagttatgaggccttgcgagtgatggggaagatgatgcgggagtgctggtacgccaatggtgctgcccgcctgacagcgctgcgcatcaagaagactttgtcccagctaagcgtgcaggaagacgtgaagatttaagctgttcctctgcctacgcaaagaacctgggcagtgaggatgcctgcagccaccgtgcaagcgtggaggcctacctcttgtttctgcccagccctctggccagagccctggtctgcaagagggacagagcctgggagacgcacactccctactgggtttgagacagacactttttatatttacctcctgatggcatggagactctgagagcaaatcatgtagatgactcgatgccacaactcgcactgcgtgcagtgggaaggacagaaagcccagtgcatctggcatgttgccaggagtggtgatgggtgctgggctcgcctgggagcagcccccataccgtgttgtccactggactgcaggtttcctccagggaccagtcaactggcagatactgagaggaaccggaagtgtcctcccttttacctgtgggcagtcctgagccacgccatccccttctcatctggaggaccgcccctagagacacaacctgctgcctgtctgtccagccaagtgcgcatgtgccgaggtgtgtctcacattgtgcctggtccgtgcctcgcccgtgtgtgtgtgtgtgtgtgtgtgtatgtgtgtgtgtaggtgtgtgtgagtgtgtgtgttagtgtaggtgtgtgagagtgtgtgtgtaggtgtgtgagtgtgggtgtgtgagagtgtgtgtaggtgtatgtgagtgtgtaagtgtgtgtaggtgtgtgagtgtgtaggtgtgtgagtgtg

SEQ ID NO: 974 - DNA, 1759 bp, Rattus norvegicus
ccgacggttggggtcgtgcaccgggtggactgatctgtttcccagaagttgggggcccgggagagcggacaggagccggaccagtcaccgcgtcctccagcagggggcgggcggcggcagcgctcctcagtgttcccgaggggcgggaagggggcgggctagcgtcacccgcgtccgtggcgatcgcggggcgcccaggacaccgctcagtatcccgcgcgcgacccccgccgctccccactccccgccgcgccctctcgcgctcccgcggccgggcaatgacgcgcaccgacccggcggcggggcggcgggaggggccccggcgtgacgcagcccgttgccaggcgccgccttataaacctcccgctcggccgccgccgagccgagtccgagccgcgcacgggaccgggacgcacgggagccgcgggccccgcgttcatgcaccgcctgctggcctgggacgcagcatgcctcccgccgccgcccgccgcctttagacccatggaagtggccaacttctacatcgagcccagctgcctggccatcggggccaaggcggcccgcgccgcgccgcgcgcccccgccgccgagccggccatcggcgagcacgagcgcgccatcgacttcagcccctacctggagccgctcgcgcccgccgccgcggacttcgccgcgcccgcgcccgcgcaccacgacttcctttccgacctcttcgccgacgactacggcgccaagccgagcaagaagccgtccgactacggttacgtgagcctcggccgcgcgggcgccaaggccgcaccgcccgcctgcttcccgccgccgcctcccgccgcactcaaggccgagccgggcttcgaacccgcggactgcaagcgcgcggacgacgcgcccgccatggcggccggcttcccgttcgccctgcgcgcctacctgggctaccaggcgacgccgagcggcagcagcggcagcctgtccacgtcgtcgtcgtccagcccgcccgggacgccgagccccgccgacgccaaggccgcgcccgccgcctgcttcgcggggccgccggccgcgcccgccaaggccaaggccaagaaggcggtggacaagctgagcgacgagtacaagatgcggcgcgagcgcaacaacatcgcggtgcgcaagagccgcgacaaggccaagatgcgcaacctggagacgcagcacaaggtgctggagctgacggcggagaacgagcggctgcagaagaaggtggagcagctgtcgcgagagctcagcacgctgcggaacttgttcaagcagctgcccgagccgctgctggcctcggcgggtcactgctagcccggcgggggtggcgtgggggcgccgcggccaccctgggcaccgtgcgccctgccccgcgcgctccgtccccgcgcgcgcccggggcaccgtgcgtgcaccgcgcgcacctgcacctgcaccgaggggacaccgtgggcaccgcgcgcacgcacctgcaccgcgcaccgggtttcgggacttgatgcaatccggatcaaacgtggctgagcgcgtgtggacacgggactgacgcaacacacgtgtaactgtcagccgggccctgagtaatcacttaaagatgttcctgcggggttgttgctgttgatgtttttgtttttgttttttgttttttgttttttttttggtcttattatttttttgtatttatataaaaaagttctatttctatgagaaaagaggcgtatgtatattttgagaacctttt

SEQ ID NO: 975 - DNA, 960 bp, Rattus norvegicus
cggccatgtcactgggcgggcggcatgcaggcctggtcagcggaagccaccctgaggatggcctcacaagtggtgccagtcttttgcataaccatgccagccttcccagccagcccagctccctccctgacctctcacagaggccacccgactcctttagtggactcgggagggcaggggtgactgcaggcgccagtgagatcaagcgggaggagaaagaggacgaggaggtcacatcagtggcagaccacgctgaggaagacaagaaggacctgaaggtcccacgcacacgtaccagcccagacgaggacgaggacgaccttctccccccagagcagaaggccgagcgggagaaggagcgccgggtggccaataacgcccgagagcgcctgcgtgtccgcgacatcaatgaggcctttaaggagctcggccgcatgtgccagctgcacctcaacagcgagaagccgcagaccaaactgctcatcctgcaccaggccgtggccgtcatcctcagcctggagcagcaggtgcgagaacgcaacctgaaccccaaagcagcctgcttgaagcggcgggaggaggagaaggtatctggcgtggtcggggatccgcagctggcgctgtcagccgcccacaccggcctgggtgaggcccacaatccagccggacacctgtgaccgtcacagggtcttcgttgaccaggaccaccacatctctgccgggtgcacccagatggtcctgatgatacatctccatcgaggcatgggcagagggctctgggacacttcagggcctgggggagttggcacggagcagcccacctgtcttggcccagtaaccaagctgaagagcggctcctcctctcgattagcgggaactggaaacaaagcagcatgcccacttatcagaaaggaaaaaagatgccttaactatgtcagacggaagagtcggaccgaattc

SEQ ID NO: 976 - DNA, 2733 bp, Rattus norvegicus
atggggacagggaccctctcatctctcctgctgctgctactcttggtgacaattggagatgctgacatgaagggacattttgacccagccaagtgccgctatgccctgggcatgcaggaccgcaccattccagacagcgatatctctgtgtccagctcctggtcggactctaccgccgcccgccacagcaggctggaaagcagtgatggagatggggcttggtgccctgcagggcctgtgttccccaaagaagaggagtacctgcaggtggaccttcgtaggctacacctggtggctctggtgggcacccagggccgccatgctgggggtctgggcaaagagttctcccgaagctaccggttgcgttactcccgagatggccgacgatggatggactggaaagacagatggggtcaggaggtgatttcgggtaacgaggatcctgggggagtggtgctgaaggatctcgggccccccatggtggcccggctggtccgtttctaccccagggctgaccgggtcatgagtgtctgtcttcgggtggagctctatggctgcctctggcgggacggactcttgtcctatacagcccccgtggggcagaccatgcaattatctgagatggtgtatctcaatgattccacttacgatggatatactgctggagggctgcagtacggtggtctgggccaactggcagacggcgtggtggggctggatgatttcaggcagagccaggagctgcgggtttggccaggctatgactatgtgggatggagcaaccatagcttccccagcggctacgtggagatggagtttgagtttgatcggctgaggtctttccagaccatgcaggtccactgtaacaacatgcacactctgggagcccgcctcccaggcggggtggaatgccggtttaaaaggggtccggccatggcctgggaaggagagcctgtacaccatgccctggggggtagccttggagaccccagagccagggccatctcggtgcccctgggtggtcacgtgggccgcttcctgcagtgcagattcctctttgcaggaccctggttactcttcagtgagatctctttcatctcggatgtggtgaacgactcgtctgacaccttcccaccagccccctggtggccgcctggcccgcctcccaccaacttcagcagcttggagctggagccccggggtcaacagcctgtggccaaggcggaggggagcccaactgccatcctcattggctgcctggtggccatcatccttctcctcctccttatcattgccctgatgctctggaggctgcactggcgccggctgctcagcaaggcagagcgccgggtgttggaggaggagctgacggttcacctctctgtccctggggacaccatcctcatcaacaaccgcccagggccccgagagccacccccttaccaggaaccccggcctcgggggactccaactcactctgcgccctgcgtccccaatggctctgcgttgctgctctccaatccggcctaccgcctccttctggccacttacgcccgtccccctcgaggcccgggcccccccacacccgcctgggccaaacccaccaacacccaggcctgcagtggggactacatggagcccgagaagccgggcgccccacttctacccccacctccccagaacagcgtcccccattacgccgaggctgacattgtcaccctgcagggcgtcacagggggcaacacctacgctgttcccgcactgcccccaggggcggttggggatgggccccccagagtggatttccctcggtcacggctccgtttcaaggagaagctcggcgagggccaatttggggaggtacatctctgtgaagtagaggaccctcaagatctggtcactagtgacttccctatcagtgtgcaaaagggacaccccttgctggtggcagtgaagatcctccggccagatgccaccaaaaatgccaggaatgacttcctgaaggaggtaaagatcatgtcacggctgaaggacctaaacatcatcaggctcctgggtgtgtgtgtgcaggatgaccctctctgcatgattacagactacatggagaacggtgacctgaaccaattcctcagtgcccaccagctggagaacaaggtcactcaggggcttcctggggacagagagtctgaccaggggcccacaatcagctaccctatgctgttacacgtgggggcccagattgcctctggcatgcgatatctggccacccttaactttgtgcatcgggacctggccacccggaactgcttggttggggaaaatttcaccatcaaaatcgccgactttggcatgagccggaatctctacgctggggattattaccgtgtacagggccgggcagtgctgcccatcaggtggatggcctgggagtgtatcctcatggggaagttcacaacagccagtgatgtgtgggccttcggagtgaccctgtgggaggtgcttatgctctgcaggtcacagcccttcgggcaactcacagacgagcaggtcatcgagaacgccggcgagttcttcagggaccagggccggcaggtatacttatccaggccacccgcctgcccgcagaccttgtatgagctgatgctccggtgttggagccgggagccggagcagcggccgcccttctcccagcttcatcggttcctggcggatgatgcactcaacacagtgtaa

SEQ ID NO: 977 - DNA, 613 bp, Rattus norvegicus
gcagcagccaagatgtgtgacttcaccgaggaccagaccgcagaattcaaggaggctttccagctgtttgaccgaacaggcgatggcaagatcctgtacagccagtgtggggatgtgatgcgggccctgggccagaaccctaccaacgccgaggtgctcaaggtcctggggaaccccaagagcgatgagatgaatgtgaaggtgctggactttgagcacttcctgcccatgctgcagactgtggccaagaacaaggaccaaggaacctacgaggattatgttgaaggccttcgtgtgtttgacaaagaagggaatggcactgtcatgggtgctgaaatccgtcatgtcctagtcacactgggggagaagatgacagaggaagaagtcgagatgctagtggcggggcatgaggacagcaacggttgcattaactatgaagagcttctccggatggtgctgaatggctgaggacatttacgtgtctcgagcctgctccttgcccagtgtgagattcctgtgtggccccagaggctccctaatcacagcaccttgcctgtctggtttcttttggatgatgtttgccttcaccaaataaaacttgctctctgtgctc

SEQ ID NO: 978 - DNA, 3001 bp, Rattus norvegicus
cggcacgagtgttcttgccctcgtagccctctgtccagccgccatgataagcgccagcagagccgcggccgcgcgtctcgtgggcaccacagcgtcccggagtcccgccgccgcccgtcaccaggatggctggaatggccttagtcatgaggcttttagatttgtttcaagaagggattatgcgtcagaagcaatcaagggtgcagttgttggaattgatttgggtactactaactcctgtgtggctgttatggagggcaaacaagccaaggtcctggagaacgccgaaggtgccagaactaccccttctgtggttgcctttacaccagatggggagcgacttgttggtatgccagcaaaacgacaagctgtcaccaatccaaacaataccttctatgctacaaagcgtcttattggacgacgatatgatgaccctgaagtacagaaagacactaagaatgttccctttaaaattgtccgtgcctccaatggtgatgcctgggtggaggctcatggaaaactctattctccgagtcagattggagcgtttgtgttgatgaagatgaaagagactgcagaaaattacttgggccatacagcaaaaaatgctgtgatcacagtccctgcttatttcaatgactcacagcgacaggccactaaggatgctggccagatatctgggctaaatgtgctccgagtgatcaacgagcctacagctgcagctctggcttacggtctggacaaatccgaagacaaagtcattgctgtatatgatttaggtggaggaacctttgacatttctatcctggaaattcagaaaggagtgtttgaggtgaaatccaccaatggggacactttcttaggaggtgaagactttgaccaagctttgttacggcacattgtcaaggagttcaagagggagacaggggttgatttgaccaaagacaacatggcgcttcagagggttcgggaagctgctgagaaggctaaatgtgagctctcctcatctgtacagactgacatcaacttgccataccttacaatggatgcttctggaccaaagcatttgaatatgaagttgactcgagctcagtttgaaggcattgtcacagatctaatcaagagaactattgctccgtgtcagaaagctatgcaggatgcagaagtcagcaagagtgacataggagaagtgatcctggttggtggcatgacgaggatgcccaaggttcagcagactgtgcaagatctttttggcagagccccaagtaaagctgttaatcctgatgaggctgtagccattggagctgccattcaaggaggtgtgttggctggtgatgttacagatgtgctactcttggatgtcactcccctctctctaggtattgagacacttggaggtgtctttaccaagcttattaataggaacaccactattccaaccaaaaagagccaggtattttctactgctgctgatggacaaactcaagtagagattaaagtgtgtcagggggaaagagagatggccggagacaacaaacttctaggacagttcactttgattggaattcccccagcccctcgtggagtgcctcagattgaagttacatttgacattgatgccaatgggattgtgcacgtttctgccaaagataaagggacaggacgtgagcaacagattgtaatccagtcttctggtggattaagcaaagatgatattgaaaacatggttaaaaatgcagagaagtacgctgaagaagaccggaggaagaaggaacgtgttgaagcagttaatatggctgaaggaattattcatgacacagaaaccaagatggaagaattcaaggaccagttgcctgctgacgagtgcaacaagctaaaggaagagatttccaaaatgagagaactccttgctcgaaaggacagtgaaacaggagaaaacattaggcaggcggcatcttcccttcagcaggcatcattgaaactctttgaaatggcatataaaaagatggcatctgaacgggaaggttctggaagttctagcactggggaacagaaggaagatcagaaggaagagaaacagtaatagtggcagtgcattgtggagctaggacgacatactatgaagcttgggagtaaaggaacttcctgagcagaaaaggggcaaacttcagtctttttactgtatttttgcagtattctatatataatttccttaatatataaatccagtgacaatatataaatccagtgacaatagctataactcatttaatggtaataaagtcagcaatagcaggttcacacttctataactagcctgctgttttcagctgcacgtaaaggggtgggatggggctgtgtaccaatcattattaggtaaatctggtttgtgctgaagtagctatgttttcgagatggaagcccatttcacatgcagtagaggtaatctgtcatggaccttgaattgaggttcatatgcagatgcttgttgaccaagagcactgctataaatgacctgtgtgtacatttgctccttcaactgatgccttgcaagactaagctctctgtgtcatggtctataggtacagaagttaggtcaatggataacagctgtgttagccatagcttaaagtgatctatcaagaattatacaagcctctcatgggcctaaggcatacttctccagctaccctcttgggtggccaatgtctgacatctatattcttgatgattgttcctttttcatccattctggattttttttttttttaataaaattctgaaagcctcttgatctcctttgtgaatggtagtagctcaaggactatgactgtaccatcaggtttgtgagtagaggtaaaaaatcaacactggctaaaaggttgaacaaattaaacatggtgagggactaaataacatgttggcatgtatgctggatgtggaagcccactcaggaagcagtgtgaagccaggcggggctacacaatgagacaccccgtct

SEQ ID NO: 979 - DNA, 987 bp, Rattus norvegicus
gaattccctttcttcgaccccgctggaggtggagacccaattctttatcaacacctattctgattcttcggccacccagaagtgtacatcttaattcttccagggtttggaattatttcacatgtagttacctattactctggaaaaaaagaacccttcggatatataggtatggtatgagccataatatctattggcttcctaggatttattgtatgagcacatcacatattcacagtaggcctagatgtagacacccgagcctactttacatctgccactataattatcgcaattcctacaggcgtaaaagtattcagctgactcgctacactacatggaggaaatatcaaatgatcccccgccatattatgagccttagggtttatcttcttattcacagtagggggcctaacagggatcgtactatctaactcatcccttgacattgtacttcatgatacatactacgtagtagctcacttccactatgtcttatctataggagcagtattcgccatcatagcttgcttcgtccactgattcccactattctcaggctataccctaaatgacacatgagcaaaagcccactttgccattatatttgtaggtgtaaacataacattttttcctcaacacttcctaggattagcagggatacctcgtcgttactctgattatccagatgcttataccacatgaaatacagtctcctctataggctcattcatctcacttacggccgtccttgtaatgatcttcatgatttgagaagccttcgcatcaaaacgagaagtgctctcaatttcctactcttcaactaacctagaatgactgcatggatgccccccaccttaccacacattcgaagaaccttcctatgtaaaagttaaataagaaaggaaggattcgaaccccctacaactggtttcaagccaatttcataaccattatgtctttctcaataaaaaaaaaaaggaattc

SEQ ID NO: 980 - DNA, 974 bp, Rattus norvegicus
cctcttgcttcccacggctgcaccatgaaaatcctgttttgtgatgtcctgctgctcagcctgctctccagcgtgttcagcagctgtcccgaggactgcctcacctgccaggagaggctccacccggctccgggcagcttcaacctgaagctgtgcatcctccagtgtgaagagaaggtcttcccccgccctctctggactctttgcaccaaagccatggccagtgactctgagcagctcagccctgctgatccagagctcacgtccgctgctctttaccagtcgaaagcctcggagatgcagcacctgaagagaatgccgcgtgtcaggagtgtggtgcaagcccgagacgcagagcctgaggcagatgcagagcctgtcgcagatgaggccgatgaggtggagcagaagcagctgcagaaaaggtttgggggcttcactggggcccggaagtcagcccggaagttggccaaccagaagcggttcagtgagtttatgaggcagtacctggtcctgagcatgcagtcaagccaacgccggcgcactctgcaccagaatggtaatgtgtagccagaaggagcccctcccagctgcaccggccactgcaacccatgagcatccaggtgagcccccgtacagcatgtgtccacaccaagacctgcaggccgggagtcaggattcctccttccctgaggcactgaacacccgcggcacctccccacagcatgtctcaccacaatcctgttgctacatcagagtgtatttttgtaattcctccagctaacattttaatggccccatcttcttgctcatcctctgccctctcgtagggccaggtgagaggaacatgaaatcagacctggggttttgcctcaccactgccataactggtttgtaaaggagctgttctttttgactgattgtttgaaacaactttctccattaaacttctactgagcaaaatggttaataaa

SEQ ID NO: 981 - DNA, 887 bp, Rattus norvegicus
atggagaaaatgtcccgacagctccccctgaaccctacctttatcccgcctccctacggcgtgctcaggtccctgctggagaacccgctgaagctcccccttcatcctgaagacgcatttagcaaagacagagacaaaggtaagaagctggatgatggtagcaacagcccgaccgtcccccagtcggccttcttgggacccaccttatgggacaaaacccttccctatgacggagatactttccagttggaatacatggacctggaggagtttctgtcagaaaatggcatcccccctagtccatcgcagcacgaccacagccctcaccctcctggtttgcaacctgcttcctccactgctccttcagtcatggatctcagcagccgggccacggcacccctccaccctggcatcccgtctccgaactgtatgcagaaccccatcagaccaggccagctgttgccagcaaaccgaaacacaccgagtcccattgaccccgacaccatccaggtcccagtcgggtatgaaccagacccggcagaccttgccctctccagcatcccggggccagaaatgtttgaccctcgcaaacggaagttctccgaggaagaactgaagccacagcccatgattaagaaagctcgcaaagtcttcattcctgatgatttgaaggatgacaagtactgggcgaggcgcagaaagaacaatatggcggccaagcgctcccgtgatgcccggcggctgaaggagaaccagatcgcaatccgggcctcattcctggagaaggagaactcggccctccgccaggaggtggctgatttaaggaaggagctgggcaaatgcaagaacatacttgccaagtacgaggccaggcacgggcccctgta

SEQ ID NO: 982 - DNA, 2415 bp, Rattus norvegicus
gactgggtgatggtgtcgctactccctccgcactctgacgtcacacttccaggctccacccgactggagggcgaaccccaaggggacctcatgcaggctccgggcctcccaggctcccctgccccacagaacaagcacgccaacttcagctgctcatcatttgtgcctgatggccctccagagagggccccctcgctgcccccccacagcccaagcatcgcatctccaggcccagagcagatccagagccactgcacagctggacctggcccaggctccttccgcctttctccctcagacaagtatcctggctttggctttgaggagggcccagcaggcagcccagggcgcttcctcaggggcaaccacatgcctttccacccttacaaggggcacttccatgaagacatcttctctgaggcccagacggccatggcgcttgatggacactcctttaagactcagggggcactggaagcctttgaggagatccctgtggatgtgggggatgctgaggcctttctgcctagcttcccagcagaggcttggtgcaatggactcccttaccccagccaggaacacaaccaaattctgcaggggtcagaggtcaaggtcaagccccaagctttggacaatggtcctgggatgtactgctaccagcctcccttgcagcatgtgtactgttcttctcagcccacctttcatcagtactccccgggtggaggcagctaccctgtgccctacctgggctccactcactacccctatcagaggattgcgccccaggccaacgcagacggtcaccagccactcttcccaaagcccatctactcctacagcatcctcatcttcatggcccttaagaacagcaagaccggaagccttccagtcagtgaaatctacaatttcatgacggagcacttcccttatttcaagactgcgcctgatggctggaagaattctgttcgccataacctgtctctcaacaagtgctttgagaaggtagagaataaatccggaagttcctcccgaaagggctgtctgtgggccctcaatccttccaaaatcgacaagatgcaggaagagctgcagaagtggaagaggaaagaccccattgctgtgcgcaaaagcatggccaaaccagaagagctggacagcctcatcggagacaaaagggagaaactgggttctcctctgctaggatgtccaccccctgggctggcaggcccaggtcccatccggcccctggcaccttcagctggtcttacccagcctctacacccaatgcatccagctccaggtcccatgcctggcaagaaccccctgcaggacctactgggtggccatgcaccctcctgctacgggcagacctacccacacctttctcccagcctggccccttctggacaccagcagccattgttttcacagccagatgggcatcttgatctgcaggcccagccaggcaccccccaggactcacctctacctgcccacacaccacccagccacggtgccaagctgctggctgagccttcctcagccaggaccatgcacgatactctgctaccagacggagaccttggcactgacctggacgccatcaacccctctctcactgacttcgacttccagggaaatctgtgggagcagctgaaggatgacagcttggccctggaccccctcgtactggtgacctcatccccaacatcatcctccatgttgccacccccaccagcagcccattgcttccccccagggccttgtctggcagaaacaggcaatgaggcaggtgaactggcacctccaggcagcggcggctccggtgctctgggagacatgcacctcagcactctctactccgcctttgtggaactggagtccacgccctcctcagcagctgccggccctgccgtgtacctcagtcccggctcaaagccattggctctggcttgagctatgcccaacatcagctgcggccttgcctagctggctgcccatatagggctcaccttaaaggtcaaagaaggaaaacactacttgtctcctatgtcactcagccaacttatttgttagccagaagctaggggatccacctaggatgctaccgggtgacgcgctccacacgcggtgcccccagcaaggaaagtgtcggaaaagaagcaacagcgcgccccctagcgccagctcactcgaacttcagctctcgagcgtgaactcaagctctacacacctgctcatcatgtgccttacactcagaggaagccttgggtcacagagtctgatttgatttctggggcagctgagagctaaaagctttagttagcaaagctcagggccagtgtgacaggtcaaagatcacccctccaaacctcatcccaatccccatgtgctctacagacttggccctctccc

SEQ ID NO: 983 - DNA, 704 bp, Rattus norvegicus
ctgcatatgaaactcaggcttgaagaactgcagtccagttcatcagctgtctggcttactccagcttaatacagggtcactcctgaaggatcctctctgagagtcattgtatgtgaagatgatgtctgcaagcaccatggctaaggtgatgatcctcatgctggcagtttgtctccttacccaggcagatgggaaacccgttaagaagagagctgtcagtgaaatacagcttatgcacaacctgggcaaacacctggcctctgtggagaggatgcaatggctgagaaaaaagctgcaagatgtacacaattttgttagtcttggagtccaaatggctgccagagaaggcagttaccagaggcccaccaagaaggaggaaaatgtccttgttgatggcaattcaaaaagtcttggcgagggggacaaagctgatgtggatgtattagttaaggctaaatctcagtaaatgctgacgtattctagaccgtgctgagcaataacatatgctgctatcctttcaagctccacgaagatcaccaagtgctaattcttctactgtaataaaagtttgaaatttgattccacttttgctcatttaaggtctcttccaatgattccatttcaatatattcttctttttaaagtattacacatttccacttctctccttaaatataaataaagtttaatgatcatgaaccaaa

SEQ ID NO: 984 - DNA, 899 bp, Rattus norvegicus
gaacacctgaaccatgttgggaattacggtcctcgctgccatcctggcctgcgcctcttgctgcgggaaccccgccttcccacctaacctgtcaaccagagtggtaggaggagaggatgctgtccccaacagctggccttggcaggtctctctccagtacctcaaggacgacacatggaggcacacctgtgggggaagtctcatcaccaccagccacgtcctcactgccgcccactgcatcaacaaagacttcacttaccgtgtgggcctggggaagtataatctgacagtggaggatgaggaaggctccgtgtacgctgaggtggacaccatctacgtccatgagaagtggaaccgactcttcctgtggaacgacatcgctatcattaagttggctgagcctgtggaactgagcaacaccatccaggtggcctgcatcccagaggaaggttccctgctgcctcaggactatccctgctatgtcacgggctggggtcgcctctggaccaatggtcccatcgctgaagtgctccagcagggcctgcagcccatcgtgagccatgccacgtgctccaggttggactggtggttcatcaaggtccggaagacgatggtgtgcgctgggggtgatggcgtcatctctgcctgtaacggagattctggcggcccactgaactgccaagcagaagacggctcatggcaggtgcacggcatcgtgagcttcggttccagtagcggctgcaacgtacacaagaaaccggtagtcttcacccgagtgtctgcctacaatgactggatcaacgagaaaatacaactgtgaagaggccgttccagaagtctcgctgcccgtctcccaacagcaataaagcttcttccatgataaaaaaaaaaaaaaaaaa

SEQ ID NO: 985 - DNA, 4068 bp, Rattus norvegicus
actcctggggcaagcgcgagcgcacactcccctttccttgctggcgctccctctcccctcgctctctctctctagaccgtcctctccttccctcgctctccaccgactcccttcgggtgctgtgcttgctcccacctgctctgaagcgctctccgctctcggacgctcccaatttagcgctcctgctcgacggccgaaccgtcgcagcctccgcaggcagcgtgccctcggggttgcggcttcaacccaccccagcttcctccctcgctacgactcgggcgccctggacgttcgaccctcgccgctgagcccgaggatggcgagcagaccatggtgacagcgctgcccggtcgctgcactcgctgaggccatgccgggctcccgacgcgtccgtccgcgcctaagggcgctgctgctgctgccgccgcttctgctactccggggcggccacgcgagcgacctgaccgtggctgtggtgctgccgctgaccaacacctcgtacccgtggtcctgggcgcgtgtagggccggccgtggaactggctctcgcgcgggtgaaggctcggccggacttgctgccgggttggacggtccgcatggtgctgggcagcagtgagaacgcggcgggcgtctgctcggacaccgccgcaccgctggccgcggtggacctcaagtgggagcacagccccgcggtgttcctgggccccggctgcgtctactccgctgccccggtggggcgcttcaccgcgcactggcgggtgccgctgctgaccgccggcgccccggctctgggcatcggggtcaaggatgagtatgcgctaaccacccgcacaggacccagccatgtcaagctgggcgatttcgtgacggcgctgcatcgacggctgggctgggagcaccaggcgctggtgctctatgcagatcggctgggcgacgaccggccttgcttcttcatagtggaggggctgtacatgcgggtgcgtgaacgcctcaacatcacagtgaatcaccaggagttcgtcgagggcgacccggaccactaccccaagctactgcgggccgtgcggcgaaagggcagagttatctacatctgcagttctccggatgccttcaggaatctgatgcttctggccctgaacgctggcctgactggggaggactatgttttcttccacctggatgtgtttgggcaaagccttaagagtgctcagggccttgttccccagaaaccctgggaaagaggagatgggcaggacaggagtgcccgccaggcctttcaggctgccaaaattattacttacaaagagcctgataatcctgagtacttggaattcctgaagcagctgaaactcttggctgacaagaagttcaacttcaccgtggaggatggcctgaagaatatcatcccagcctccttccacgacgggctcctgctctatgtccaggcagtgacagagactctggcacaggggggaactgtcacagatggagagaacatcactcagcggatgtggaaccgaagcttccaaggtgtgacaggatacctgaaaattgatagaaacggagatcgggacaccgatttctctctctgggatatggatccagagacgggtgccttcagggttgtcctgaactataatggtacttcccaggagctaatggctgtgtcagaacacaaattatactggcctctgggatatccacctcctgacgtccctaaatgtggctttgacaatgaggacccagcctgcaaccaagaccacttttccacactggaggttctggctttggtgggcagcctctctctgattagctttctgattgtgtctttcttcatatacaggaagatgcagctggaaaaggagctggtctcagagttgtggcgggtgcgctgggaggacttgcagcccagcagcctggagaggcatcttcggagcgctggcagccggctgaccctgagtgggcgaggctccaattatggctccctgctaaccaccgagggccagttccaagtctttgccaagacagcatactataagggcaaccttgtggctgtgaaacgtgtgaaccggaaacgcattgagttgacacgaaaagtcctgtttgaacttaaacatatgcgggatgtgcagaatgagcacttgacaagatttgtgggtgcttgtaccgacccccccaacatctgtatcctcacagagtactgtccccgtggaagcctacaggacattctagagaatgagagtatcaccctggactggatgtttcggtactcgctcaccaatgacattgtcaagggaatgctctttctacacaatggggccatttgttcccatgggaacctcaagtcatccaactgtgtggtagacgggcgcttcgtgttaaagatcacagactacggtcttgagagcttcagagacccggagccagagcaaggacacaccctctttgccaaaaaattgtggacggcacctgagctcctgcgaatggcttcgccacctgcccgtggctcccaagctggggatgtgtacagctttggtatcatcctgcaggagattgccctaagaagtggggtcttctatgtggaaggtttggacctcagcccaaaagagatcattgagcgtgtgactcggggtgagcagcccccattccgaccctccatggatctgcagagccacctggaggaactggggcagctgatgcagcggtgctgggcagaggacccacaggagcggccaccctttcagcagattcgcctggcgctgcgcaagttcaacaaggagaacagcagcaacatcctggacaacctgctgtcacgcatggagcagtatgctaacaacctggaggaactggtagaggagagaacacaagcttatctggaggagaagcgcaaagctgaggccttgctttaccagattctgcctcactccgtggctgagcagctgaagagaggcgagacagtccaggctgaggcctttgatagtgttaccatctacttcagtgatattgtgggctttacagctctttcagcagaaagcacacccatgcaggtggtgactctgctcaatgatctgtacacctgttttgatgctgtcatagacaactttgatgtgtacaaggtggagaccattggtgatgcttacatggtggtgtcagggctcccagtgcggaatggacaactccacgcccgagaggtggcccgaatggcacttgcactactggatgctgtgcgctccttccgcatccgccataggccccaggaacagctgcgcttgcgcattggcatccacacaggtcctgtgtgtgctggtgtggtagggctaaagatgccccgatactgcctctttggagacacagtcaacacagcttcaagaatggagtctaatggagaagccctcaagatccacttgtcttcagagaccaaggctgtgctggaagagttcgatggtttcgagctggagctccgaggggatgtggaaatgaagggcaaaggcaaggttcggacctattggctcctgggggagcggggatgtagcactcgaggctgacctactgccctgctgttccttgtcacccctcctccctgtgccagaggtgacagaggtgtccagcttccacctctcccacagcagcccagccactgtggaaggattagggacctgaccagcacagtcaccagatgtgacctctgagagaggatggagatggtggggactgcaggggacacctaagtttgtaggactgactgaaacacacagtccctcccatggcacccttgtggcacacatgcccagtcccacccttactctgctgcctagattgggacagcgattccttctctgccctcaacttagctccactgtgacttatagggagggaattgccacctgaaggaaacagaaagaggttagagtttgcaggaggcgggcagtcctgtgtcacaaatactcccctcacttccagcccaccacctgccccacagactttggacacagctcactgaggagaagagaagctgccggttaccttgcttctcctgtgaaccaaaccattaaagtctttattcctgtga

SEQ ID NO: 986 - DNA, 3144 bp, Rattus norvegicus
ccgtgactgaagaagccattgccaagggtatcgcaggattgttgctgtcacaggtgctgtagactgaggttgaaggactaccccggagacggctgcagtcgttcggttcctgtctcttccgtgtaggatttgatttctcctaaacttggtttaagacttttaaagaaggccctaatttatcgaggcctgtttgtgaagtaaaattcggctggctactctcaacggaagaaagatgcaactgctaggccgggtgatctgtttcgtcgttgggatcctgctttctgggggcccaacggggaccatatcagctgtggaccctgaagcaaacatgaatgtgactgagataatcatgcactggggatatccagagcactcagtacagacaggagatggctacattctgggtgttcaccgaatcccgcatgggcggaagaaccagtttgataaaggtcccaaaccagttgtgtatcttcagtggcgacatggcttcctggcagattctagtaactgggtcacaaacattgacaacaacagcctgggcttcatcctggcagatgctggctttgatgtgtggatgggaaacagcagaggaaacacctggtctcggaagcacaagactctgtcagtttctcaggatgaatactgggccttcagttttgatgagatggcaaaatatgacctccctgcttcaattaactacattttgaataaaactggccaagaacagctgtataatgtgggccactctcaaggctgcaccataggttttatagcattttcacagatgcctgaactggcaaagaaggttaaaatgttttttgccctggctcctgtgttgtctctcaattttgcttcgggcccgatggtcaaattgggacggttgccggatctgcttcttgaggacttgtttgggcagaagcaatttcttcctcagagtgcaatggtgaaatggctaagcactcacatttgcacgcacgtcatcatgaaggagctttgcgccaacatcttctttctgatatgtggcttcaatgagaagaatttaaacatgtctagagtggatgtgtatacaacacactgtcctgcgggaacctctgtgcaaaacatggtacactggacccaggttgttaaataccataagcttcaagcttttgactggggaagcagtgacaagaattattttcattacaatcagagttatccacccttgtacagcataaaagacatgcaactacccactgctttatggagcgggggcaaggactggctggcagacaccagtgacatcaatatcttactgactgaaatccccacgttagtgtaccacaagaacattcccgagtgggaccatctggattttatctggggtttggatgccccctggaggctgtataatgaagtagtcagtctaatgaagaaataccagtgagtgccaagacttgagatgcttccccttcactaggggaaaaaaggacagatgtttgcttaattcctgcaaaatactgtgttttcctggtctagatcatttgtattttttatgtgcaagaaaacgatgatgttgaagacatacatgggtctggtcagtaagaagcacgctggctgtcttctgcttcattctgactgacaagccagagtcacaaccagtgatgcctttgaagtttttagaaagtatgggtgttacgtgaaagaagccattgcaacctcttgtttactttttacggtcgttttcggtgtctgcatgctgtgcatatacatgcctatgtgtgtgccctgtgctggccagagcctccttgtgtggaggtaatggctcacatcagggtatcttccctcagacactggtctctcgacgaaccagtcagtagcttgctattccagttagactggctgaccagggagcctccagaatctgtccgtctctaccttccctcaccaggtctacggagggtgatgtcccagccagcattttacactggttctagggacaggaactcaggttctcatgcttgatagcaagccctttcttcaccaaaccattgcctcaaaccctctgtgatcgaaaagctgctcaattacctttatgttcccacccaatgcaagtgaacgagcacaagacatttcaagctgttgtttgtgagctaaaaatcaatctgccagtgacttgaacatgctagggagaaactcctggccctgagcttgacaaacctgcagtccaggttctccagagattgagacagggaggctgctgttacatttagggttcatttggagagtgagactttgtctctacaaaaccaaagacaaaggagaagaagaaaaaaaaaaccctaaagtactcagttctcatctgttagcctcagagggcttagagagttcctgtgtttacctatccgaacaacattttcatgtctttatgcagtagctacctagtgaaatccagtgttatcccagcttctccaggcgtaaacattctctcttcaatctcatcagacctcagtagcaagcatttagtgaatatttagatttttcaggccaagccaagacaaaaatgaatagaataaaagaaaaaagagcccagactcttgaaagcggtttgcactgatttaaaaataaaaaaaaagaatcttgaagaatgacatgataaactgtgttggttccgcatgtgtagtcggatcccttttctgtggagaacgttctgtggagggacaaaccactaatttgccccaagtgaatgtggctgtagtgacagcgacagtgcctctgatcctgagaagcagggctggctgccggtgacaagcatcccagttcctttccccagagatgaagaggatgttttcagacagagctcggctcagggaatttcgcttggagaatcagtggtttatgtgcacaatgttttagtgagcctgctctgcgcctgatatggggaagccctcgactgttcaccgggctcgtgggcgacggctgccgtcagctggacagtggataagttttctgagtagtcaccacagattcagggatatcgctttgtgtcgactcctaaggaaggcaggacgatatgacttggtaacattgtaaaggttcacatttaaacttttcaataaatctcagcctcacaggcctgaacatcaaaaaaaaaaaaaaaaaaaa

SEQ ID NO: 987 - DNA, 1444 bp, Rattus norvegicus
agcagctctgtaagaagggaatgtcggcttttacataacgttcctctctgcttttgacacactgtgtgagggtccatcttctgatcacagatggagtggaatggcttgaagatgataattagcaccatggagcctcaggtgtcaaatggaccgacatccaatacaagcaatggaccctccagcaacaacagaaactgtccttctcccatgcagacaggcgccgccacagacgacagcaaaaccaacctcatcgtcaactatttaccccagaatatgacccaagaggaattcaggagtctctttgggagcattggtgaaatcgaatcctgcaaactcgtgagagacaaaattacaggacagagtttagggtatggatttgttaactatattgatccaaaggatgcagagaaagccatcaacactttaaatggactcagactccagaccaaaaccataaaggtgtcgtacgcccgtccgagctcggcctcaatcagggatgctaacctgtacgttagtggccttcccaagaccatgacccagaaggagctggagcagcttttctctcagtacggtcgcatcatcacctcacgcatcctggttgatcaagtcacaggagtctctagaggggtgggattcatccgctttgataagaggattgaggcagaagaagccatcaaagggctgaatggccagaagcccagcggtgctacagaaccgattactgtgaagtttgccaacaaccccagccagaagtccagccaggccctgctctcccagctgtaccagtcccccaacaggcgataccctggccctctccaccaccaggctcaaagattcaggctggacaatttgcttaatatggcctatggcgtaaagagactgatgtctggaccagtccccccttctgcttgtccccccaggttctccccaatcaccattgacgggatgacaagtcttgtgggaatgaacatccctggtcacacagggacaggctggtgcatcttcgtctataacctgtcccctgattctgatgagagtgtcctctggcagctctttggcccctttggcgcagtgaacaacgtcaaggtcatccgtgacttcaacaccaacaaatgcaagggattcggctttgtcaccatgaccaactacgatgaggcagccatggccatcgccagcctcaatggttaccgcctgggagacagagtgttgcaagtttcctttaaaaccaacaaagcccacaagtcctgaatttctcacccttacttattaaaaaatatatataaatatatacgaacaaaacatgcgtgcacacacatacacaaaagagagagacaaactttccaaggcttatattcaaccatggactttataagcccgcgttgcctaagtattaaaacattggattatcctgaggtgtaccaggaaaggattttataatgcttag

SEQ ID NO: 988 - DNA, 897 bp, Rattus norvegicus
gcggcttcacgttcgcttctctctccactacagtatggggccggcgccgcgcgtcctggaactgttctacgatgtgctgtccccctactcctggctgggctttgaggtcctatgcagataccaacacctctggaatatcaagctgaagttgcggcccgctttactcgctgggatcatgaaagacagtggaaaccaaccaccagctatggttccccacaaaggccagtacatactcaaagagattcctctcctgaagcagctcttccaggttcccatgagcgtccccaaggatttctttggtgaacatgttaagaaaggaactgtaaatgccatgcgcttcctcaccgcggtgagcatggagcaaccagagatgctggagaaggtgtccagagagctgtggatgcgcatttggtcccgagatgaagatatcacggagtcccagaacattttgtctgcagcagagaaggccggaatggccacagcgcaagcccaacaccttctgaataagatctccaccgaactggtgaagagcaagctcagggagaccactggggcagcctgcaaatatggggcctttgggctgcccaccactgttgcccacgtggatggtaaaacctacatgctatttgggtctgaccgcatggagttgctagcttacctgctaggagagaagtggatgggccctgtgcccccaaccctgaatgccagactttaagattgccttagaaagtaaactttgacatctccatctgatgaagctgtcttctgtggccctgggggttgaaacaagagtccacctttagctgtggctgcctttacgtctgtgcctcccaagtgcctcttgaaaaaccttaagctctgcattcccataaataaacccgatgccactagacaaca

SEQ ID NO: 989 - DNA, 1790 bp, Rattus norvegicus
aattcaggcagatagtgaatggctatcgccaccagaagcacaagaagggaaggttatttcaggaacctctgatgctgcagatccccaagactgtggactggagagaaaagggttgtgtgactcctgtgaagaatcagggccagtgtggttcttgctgggcttttagcgcatcgggttgcctagaaggacagatgttccttaagactggcaaactgatctcactgagtgaacagaaccttgtggactgttctcacgatcaaggcaatcagggctgtaatggaggcctgatggattttgctttccagtacattaaggaaaatggaggtctggactcagaggagtcttatccctatgaagcaaaggatggatcttgtaaatacagagctgagtatgctgtggctaacgacacagggtttgtggatatccctcagcaagagaaagccctcatgaaggctgtagcgacggtggggcctatttctgttgccatggatgcaagccatccgtctctccagttctatagttcaggtatctactatgaacccaactgtagcagcaaggacctcgaccatggggttctggtggttggctatggttatgaaggaacagattcaaataaggataaatactggcttgtcaaaaacagctggggtaaagaatggggtatggatggctacatcaaaatagccaaagaccggaacaaccactgcggacttgccaccgcagccagctatcctatcgtgaattgatggacagcgataataaggacttacggacactacatccgaaggagttcatcttaaaactgaccaaacccgtctctgagtgagaccatggtacttgaatcgttcaggatccaagtcacgatttaaattctgttgacatttttacatgggttaaatgttaccactacttaaaactcctgttataaacagctttataatattggacacttaatgcttaattctgattctggaatatttgttttataaaagttgtataaaactttctttaccttttaaaaataaattttagctcagtgcatgtgtgtgtgtatgggttaggggaacttcctgtgtgaaatgtgttcacaaatgtttgagactaaagactgactgattccagatgtccggactgattcgggtgtcagtggtagacctggggaaaggtgacaggtgctctggatggagccttctgattttacctcagcgtcctgtcaggttaggtatgtgtaagtaaatctagcttatggggtaattgttttttctttatttgtgtgagtatgtgtgtgtggaggtcagagaacaactcatttctacagtgttgatcctagcgatcaaaatcaggttgtcaggctggaccacaggtgccttttactactgaggtatcttgccagccccactggttttaagtgacgtataattacatatgtttatgtagtacaatataatgtgttgtgatacgtgtatactatgaaatgatctgatagttcacctcaaatattttattactttgttgaacttttctagctgtttctaaaatacacagtatattatcattggacctgtcttgttaatgtagcccaggctggccttaagccataatcttccttctcagccttctgtgagctaagataaaaaaaaaaaatcatgtaatgttatacccagtctcaagtcttatatctggcaaaccttgacagtccagaagaactagagtaaattgtttgacagtcctctcaactttcctaattctgtgacctttcaatatagttcctcctgttgtgaccccaaaaa

SEQ ID NO: 990 - DNA, 3452 bp, Rattus norvegicus
atgaggattatttgcaggcagattgtcttgttgttttctggattttggggactcgccatgggagcctttccaagcagcgttcaaataggtggtctcttcatccgaaacacagaccaggaatacactgcttttagactggcaatctttcttcataacaccagccccaatgcatcggaagctcctttcaatttggtacctcatgtggacaacattgagactgccaacagttttgctgtgacaaacgccttctgttcccagtattctagaggggtgtttgccatttttggactctatgacaagagatccgtgcataccttgacctcgttctgcagtgctctgcacatctctctcatcacaccaagctttcccactgaaggggagagccagtttgtgctgcagctaagaccttcactgagaggtgcactcctgagcctcctggatcactatgagtggaactgtttcgtcttcctgtatgatacagacagggggtattcaatacttcaagctataatggaaaaagcaggacaaaatggatggcatgtcagtgcaatatgtgtggaaaattttaatgatgtcagctacaggcaactgctagaagagcttgacagaagacaagagaagaaatttgtgatagattgtgagatagagaggcttcaaaacattttagaacaaattgtgagtgttgggaagcatgtcaaaggctaccattatatcatcgcaaatttgggtttcaaggatatttctcttgagagatttatacatggaggagcaaatgtaacaggattccagttggtagattttaatacacccatggtaaccaaactaatggatcggtggaagaaactagatcagagagaatatccaggttctgaaacacctccaaagtacacctctgctctcacttatgatggagtcctggtgatggctgaaactttccgaagtctcagaagacagaaaattgatatttcaaggagaggaaatgctggggactgtctggcaaaccctgctgctccctggggccagggaattgacatggagaggacactgaagcaggttcgaattcaagggctgactgggaatgttcaatttgaccattatggacgtagagttaattacacaatggatgtgtttgaactaaaaagcacaggacctcgaaaggttggctactggaatgatatggataaattagtcttgattcaagatatgcctactctgggcaatgacacagcagctattgagaacagaacagtggttgtaaccacaattatggaatctccctatgttatgtacaagaaaaatcatgaaatgtttgaaggaaatgacaagtacgaaggctactgtgtagatctggcatcggaaattgcaaaacatattggtatcaaatataaaattgccattgttcctgatggaaaatatggagcaagggacgcagacactaagatctggaatgggatggtaggagagcttgtgtatgggaaagcagagattgctattgcccctctgacaatcacattggttcgagaggaagtcatcgatttttctaagccttttatgagtttaggcatctctatcatgatcaaaaaacctcagaaatctaaaccaggagtcttttccttcttggaccctctggcctatgagatctggatgtgcatagtgtttgcatacattggtgtcagtgtggtcttgttcctagtcagtaggtttagcccatatgagtggcacacagaagaacctgaggatgggaaggaaggacccagtgaccagcctcccaatgaatttggcatctttaacagcctttggttttccctgggtgcctttatgcaacaaggatgtgacatttcacccagatccctgtcaggtcggattgttggaggcgtgtggtggttcttcacactcatcattatatcgtcctacactgctaatctggctgcattccttactgtggagagaatggtctcccccatagaaagtgcagaagacctggccaaacaaacagaaattgcctatggaacacttgattctgggtcaacaaaagaattcttcagaagatcaaaaatagcagtgtatgaaaagatgtggacctacatgcgatcggcagagccgtctgtgttcactagaactacagctgagggcgtggctcgtgtccgcaagtccaagggcaaatttgcctttctcctggagtccacgatgaatgaatacattgagcagcgaaagccctgtgacacgatgaaagtgggaggaaacctggattccaaaggctatggtgtagcaacgcccaagggttcctcattaggaaatgctgttaacctcgcagttttaaaactgaatgaacaaggcctcttggacaaattgaaaaacaaatggtggtacgacaaaggagaatgtggcagcgggggaggtgactccaaggacaagacgagtgccttgagcctgagcaacgtagcaggcgtcttctacattctggttggcggcctgggcttggcaatgctggtggctttgatagagttctgttacaagtccagggcagaggcgaagagaatgaaggtggcaaagagtgcacagacttttaacccaacttcctcgcagaatacccacaatttagcaacctatagagaaggttacaacgtatatggaaccgaaagtattaagatttagggctgactttttccgaagccataagaaacaaagccaggttatccatcactgggagtgtgggagaaaacggccgtgtgctgacccctgactgccccaaggccgtacacacaggaactgcaattagacaaagttcgggattggctgtcattgcatcggacctaccataaaaaccaaaaaaataattgagtgccttaatcaaactgtgttggtgactgactgaaacgcagccctgagggaaaggccaagagtgggtcttgactaaatccatcctttggcttgagagcaggaagagcatactgagtgccggacagaaccagtgcatgatttcagcacggaaatgcagactcggatttttttttatcaggaaaactcacaatttagtttttttggggatagagggtgggggatagctgggataggtgtattaacagcaacaaatttcasatgagcgcacttaaaastaatcagactggtcagttagtgcattaaactgtgaagttstttctcagaaaggtcttagtcactacagcaacagattcaacagttactagaggtcaaggaaccttctacctgtgtctccagaacacccatttagtcgatggcataatctgcagctgaaayaagcagtcactaagatgtgataagaaaataataaatatgtaaatcctgtgaaaaaaacaacaaaatttaaagaaagtatttacagttactttggaaataaaacaatactgaaacatgcttgctttttaactgaagtaaatccagtagaggacaacacaattgttttttctaaccat

SEQ ID NO: 991 - DNA, 3272 bp, Rattus norvegicus
gcggccgcagctgccgggagatgcgagcgcagaccggattgtgatcacctttccctcttcgggctgtaagagagcgagacaagccaccgaagcgaggccactccagagccggcagcggagggacccgggacactagagcagctccgagccactccagactgagcggacgctccaggtgatcgagtccacgctgcttcctgcaggcgacaggcgacgcctcccgagcagcccggccactggctcttcccctcctgggacaaacttttctgcaagcccttggaccaaacttgtcgcgcgtcaccgtcacccaaccgggtccgcgtagagcgctcatcttcggcgagatgtctgagcgcaaagaaggcagaggcaaggggaagggcaagaagaaggaccggggatcccgcgggaagcccgggcccgccgagggcgacccgagcccagcactgcctcccagattgaaagaaatgaagagccaggagtcagctgcaggctccaagctagtgctccggtgcgaaaccagctccgagtactcctcactcagattcaaatggttcaagaatgggaacgagctgaaccgcaaaaataaaccagaaaacatcaagatacagaagaagccagggaagtcagagcttcgaattaacaaagcatccctggctgactctggagagtatatgtgcaaagtgatcagcaagttaggaaatgacagtgcctctgccaacatcaccattgttgagtcaaacgagttcatcactggcatgccagcctcgactgagacagcctatgtgtcctcagagtctcccattagaatctcagtttcaacagaaggcgcaaacacttcttcatccacatcaacatccacgactgggaccagccatctcataaagtgtgcggagaaggagaaaactttctgtgtgaatgggggcgagtgcttcacggtgaaggacctgtcaaacccgtcaagatacttgtgcaagtgcccaaatgagtttactggtgatcgttgccaaaactacgtaatggccagcttctacaaagcggaggaactctaccagaagagggtgctgacaattactggcatctgtatcgccctgctggtggtcggcatcatgtgtgtggtggcctactgcaaaaccaagaagcagcggcagaagcttcatgatcggcttcggcagagtcttcggtcagaacggagcaacctggtgaacatagcgaatgggcctcaccacccaaacccaccgccagagaacgtgcagctggtgaatcaatacgtatctaaaaacgtcatctccagtgagcatattgttgagagagaagtggagacttccttttccaccagtcattacacttccacagcccatcactccacgactgtcacccagactcctagtcacagctggagtaatgggcacacggagagcgtcatttcagaaagcaactccgtaatcatgatgtcttcggtagagaacagcaggcacagcagtcccgccgggggcccacgaggacgtcttcatggcctgggaggccctcgtgataacagcttcctcaggcatgccagagaaacccctgactcctacagagactctcctcatagcgaaaggtatgtatcagccatgaccaccccggctcgtatgtcacctgtagatttccacacgccaagctcccctaaatcgcccccttcggaaatgtctccacccgtgtccagcatgacggtgtccatgccctctgtggcagtcagcccctttgtggaagaagagaggcctctgctgcttgtgacgccaccaaggctacgggagaagaaatatgatcatcacccccagcaactcaactcctttcatcacaaccctgcacatcagagtaccagcctcccccctagcccactgaggatagtggaggatgaggagtacgagacgacccaggagtatgagtcagttcaagagcccgttaagaaagtcaccaatagccggcgggccaaaagaaccaagcccaatggccacattgccaataggttggaaatggacagcaacacaagttctgtgagcagtaactcagaaagtgagacagaagacgaaagagtaggtgaagacacaccattcctgggcatacagaaccccctggcagccagccttgaggtggcccctgccttccgtctggctgagagcaggactaacccagcaggccgcttctccacacaggaggaattacaggccaggctgtctagtgtaatcgctaaccaagaccctattgctgtataaaacctaaataaacacatagattcacctgtaaaactttattttatataataaagtatttcaccttaaattaaacaatttattttattttagcagttctgcaaatagaaaacaggaagaaaaaaaaacttttataaattaaatatatgtatgtaaaaatgtgttatgtgccatatgtagcaatttttttacagtatttcaaaaacgagaaagatatcaatggtgcctttatgttctgttatgtcgagagcaagttttataaagttatggtgatttctttttcacagtatttcagcaaaacctcccatatattcagtttctgctggctttttgtgcattgcattatgatgttgactggatgtatggtttgcaaggctagcagctcgctcgtgttctctctctctctctctctctctctctctctgtctctctctctgtctctctctctctctctctctctctctctctctctctctctctctctctctctctgtctctctctctgcttcccgtagctcccaaccagtactgtcttggactggcacatccatccaaatacctttctactttgtatgaagttttctttgctttcccaatatgaaatgagttctctctactctgtcagccaaaggtttgcttcactggactctgagataatagtagacccagcagcatgctactattacgtatagcaggaaactgcaccaagtaatgtccaataataggaagaaagtaatactgtgatttaaaaaaaaaaacaaactatattattaatcagaagacagcttgctcttggtaaaaggagctaccattgactctaattttgactttttagttattgttcttgacaaagagtaacagcttcaagtacagcctagaaaaaaaaatgggttctggcctgctatcaggataaatctatcgacgtagatagattcaactcagtttcactttctgtcttgggggaaatgatccagccactcatatgacgaccaaccaaccacaggtgcctctgctccctgt

SEQ ID NO: 992 - DNA, 2741 bp, Rattus norvegicus
ccgccggcgcccccgcgcccgcccccgccccggcccgcgcccggcccgccgcccgcgcccgcgccccgcgcccgcggccccgccgccggcccggacatggccgccaacatgtacagggtcggagactatgtctactttgagaactcctccagcaacccgtacctgatccgcaggattgaagagctgaataagacagccaacgggaatgtggaggccaaagtggtgtgtttctacagaaggcgggacatttccagcagcctcatcgcgctggctgacaagcatgcaaccctgtcagtctgctatagagccggaccgggggcggacaccggcgaggaaggggaagtggaggaggaggtagaaaacccagagatggtagacctgcctgagaaacttaagcaccagctgcggcatcgggaactgttcctctctcggcagttggagtctctgcctgccacccacatcaggggcaagtgcagtgttaccctgctcaatgagaccgagtcactcaagtcctacctggagcgtgaggatttcttcttctactctctagtctacgacccacagcagaagaccctcctggctgataaaggcgaaattcgtgtagggaaccggtaccaggctgacatcactgatttgctgaaagacggtgaggaggacggccgcgatcagtcgaagctggagaccaaggtgtgggaagcccacaatccacttgtagataagcagattgaccagtttctggtggtggcccgctctgtgggtacctttgcacgggccctggattgcagcagctccgtgcggcagcctagcctgcacatgagtgccgccgcagcctcccgagacatcaccctgtttcatgccatggacacgctgcacaagaacatctacgacatctccaaggccatctctgcccttgtgcctcagggtgggccagtgctctgcagggatgagatggaggagtggtcagcatcagaagccaacctttttgaggaagctctggaaaaatatgggaaagatttcacagacattcagcaagactttctcccatggaagtcgctcaccagcatcattgagtattactacatgtggaagaccaccgacagatacgtccagcagaaacgtttgaaagcagctgaagcagagagcaagttaaagcaggtttatattcccaactataacaagccaaacccaaaccagatcagcgtcaacagtgtcaaggccagtgtagtgaatggcacagggacaccaggccagagccccggggccggtcgggcctgcgagagctgttacaccacacagtcttaccagtggtattcttggggtccccctaacatgcagtgtcgcctctgcgcatcttgttggacatattggaagaaatatggtggcttgaaaatgccaacccggttagatggagagaggccgggaccaaaccgcaataacatgagtccccatggcatcccagctcggagcagtgggagccccaagtttgccatgaagacaaggcaggccttctacctgcatactaccaagttgacacgcattgcccggcgcttgtgccgtgagatcctacgcccatggcatgccgcacgccacccctacatgcccatcaacagtgcagcaatcaaggctgaatgcacagcacggctgcccgaagcttcccagagcccactggtgctgaagcaggtagtacggaagcccctggaggctgtgctccggtatcttgagactcatccccgcccgcctaagcccgaccctgtgaagagctcatccagtgtgctcagcagtctgacccctgccaagtcagcccctgtcatcaacaatggctcccctaccatcttgggcaagaggagctatgagcagcacaatggggtagatggtctggcaaaccatggacagaccaggcacatgggaccaagtcggaatctcctgctcaatgggaagtcctaccccaccaaagtgcgcctaatccgaggcggctccctgcctccagtcaagcggcggcggatgaactggattgacgccccagatgatgtattttacatggccaccgaggagaccaggaaaatccgaaagctgctctcatcttcagaaaccaagcgtgctgcccgccggccctacaagcctattgccctgcgccagagccaggccctgccgctgcggccacccccacctgcaccagtcaatgatgagcccattgttattgaggactaggcggtcacccacagtggcctgcctgggcccctccatcagccccagagtatccagtgaggcctgcagaggccaagcggcctccctcccccaccagactgctgcccaccccaccctctgtttccgtagtgccccaactcccgccctcacatgcagagaaactgctcctctggtggacatgcgggggaagaagtgtggtctaacttattccaagacaccgaggagtcttttttagctttgtgtttactttctggctggagcagagatgaggagtgccctgggccgtgggctgcagggcttctcagctggggtgggctctaaggttttgttgtgttctgttgaaggtgccattttaaattttatttttattacttttttgtagatgaacttgagctctgtaacttacacctggaatgttaggattggtgcagccagcagcggccaagctgcctggcagggttggtcccttgtcttttcaagtaattttcatattaaacaaaaacaaagaaaaaaatctcataaaaaggaaaacccca

SEQ ID NO: 993 - DNA, 2627 bp, Rattus norvegicus
gcgttcctgccgcgcagcccctccgtcgcggttcccctccctcggggctgatcattaactcaaaagcagtataaggagtgagtggccccggtgagccggtgagccggagggactcgtcgccaccgccatggacagtagcaccttgagccccgctgttactgccaccgatgcacccatccagtcctatgagcgcattcgcaatgcggctgacatatcagtcatcgtcatctacttcgtggtggtgatggctgtcgggctgtgggccatgttttccactaatcgtgggactgttggaggcttcttcctggcaggccgaagtatggtgtggtggccgattggagcctctctctttgccagtaacatcggaagtggtcactttgtggggctggcgggcacaggagcagccgcaggcattgccatgggtggcttcgaatggaacgccttggtgttcgtggtcgtgctggggtggctttttgtccctatttacatcaaggctggggtggtgacgatgccggagtatctgcggaagcgatttggaggcaagcggatccagatctacctttccgttctgtccctgctcctctacatctttaccaagatctcagcagacatcttctctggggctatattcatcaatctggccttgggcctggatatatacctggccattttcatcctgctggccatcaccgccctttacaccatcacagggggactggcagcagtaatttacacagacaccttgcagactgcgatcatgctggtgggatcttttatcctgactgggtttgctttccgagaagtaggagggtatgaggccttcatggataagtacatgaaagctattccaactttggtttctgatggaaacataaccgtcaaagaagaatgttacacacccagggccgactcgttccacatattccgagaccccattacgggggacatgccatggcctgggctcatcttcggcctgtccatcctcgccctgtggtactggtgtacggatcaggtcattgtgcagcgatgcctctcggccaagaacatgtctcacgtgaaggctggctgtaccctgtgtggctatctgaagctactgcctatgttcctcatggtgatgcccggaatgatcagccggattctatacacagacaaaatcgcctgtgtcctcccctcagaatgtaagaaatactgcggcaccccagtgggctgtaccaacatcgcctacccaacactggtggtggaactcatgcctaacggacttcgaggcctgatgctgtccgtcatgatggcttccctcatgagctccttgacctccatcttcaacagcgccagtactctcttcaccatggacatctacaccaagatccggaagggtgcatcggagaaggagctcatgattgcaggaaggttgttcatcctcgtgctgattggcatcagcattgcctgggtgcccattgtgcagtctgcccaaagcgggcagctctttgactacatccagtccatcaccagttacctggggccacccattgcagccgtcttcctgctggctattttctgcaagagagtcaatgaaccgggagccttctggggactgattctcggcttcctgattggaatctcccgtatgatcactgagtttgcctacggaactggaagctgcatggagcccagcaactgccccaagatcatctgcggggtccactatctgtactttgccatcatcctcttcgctatcagcgtcgtcaccgtcttggtcatctccctcctcaccaagcccatcccagacgtacacctgtaccgtctgtgctggagtctacgtaacagcacagaagagcgcatcgacctggatgcaggagaggaggagcccgtcgaggaggaccctaaagataccattgaaatagatgcagaagccccccagaaggagaaggggtgcttcaggaaggcatatgacctgttctgtgggctggaccaggataaaggaccgaagatgactaaggaagaggaggaagctatgaagctgaagatgacggacacttccgagaagcccttgtggaggacagtggtgaacatcaacggcatcatcctcctggcagtggctgtcttctgccacgcctattttgcctgaaccccgccttctgggggtagacttggcgactctggagttgttatttcccactagaccccgccactctgtagtggtaaggggaaactggccagttgtaaattttactcattcggataaaagatgtataagtgtgattatagacttgcttgaggaaaatgattaccctgctgtgaatttatgcctgtgaaaccagtgtgccacactcatccatcacaccagagctttggagtgacgttgactcagatgtagaaaaagtcataccgagacacagaggccctgtgttgtctgtctcaggtacgtccagcgtgtaactattgtttataattcttaaatactattttttaaaattgtggtctggttcctgacatttttctacctgacccctcaccaattcctcctcctcctcctattttttttttctaaaagaaatctcccatcatcgcatccctttagagttttttggttttttgttttgttttgttttttgtttttgtttttaatt

SEQ ID NO: 994 - DNA, 2759 bp, Rattus norvegicus
aacctggtggcccttctcgacagcggagcgcgcggggacgctgcagcggcgggcaacgcgggcaggcagcgcgctccaggcagggccgcctggtcacctcccggcgccggggcggcgcggcgatggccagggcgcagagggaggcagagaccggcgggcgacggcgggcggagggggcgcggggacgcggccgggcgcccctgcccgccctggtgcccgccgcctaaggctgcccggggcgcgggagccggcgccggcgcggcgcgggcgcaggagaccactcgaggcgcgatgtcggtgccgctgctgaagatcggggtcgtgctaagcaccatggccatgatcaccaactggatgtcccagacgctgccctcgctggtgggcctcaataccacccggctctcggccgccagcggcgggacgctggaccgcagcaccggcgtgttgcccaccaaccccgaggagagctggcaggtgtacagctctgcccaggacagtgagggcaggtgtatctgcacggtggtcgccccccagcagaccatgtgttcacgggatgcccgcacaaaacagctgaggcagctactggagaaggtgcaaaacatgtctcaatccatagaagtcttggacaggcggactcagagagacctgcagtacgtggagaagatggagaaccagatgaaaggcctggagtccaagttcaggcaggtggaggagagccataagcagcatctggccaggcagttcaaggcaataaaagcgaaaatggatgaacttaggcctttgattcctgtgttggaagagtacaaggccgatgccaaattggtattgcagtttaaggaggaggtccagaatctgacgtcagtgcttaacgaactgcaagaggaaattggcgcctatgactacgatgaacttcagagcagagtgtccaatcttgaagaaaggctccgtgcatgcatgcaaaaactagcctgcgggaagctgacaggcataagtgacccggtgactgtcaagacctcaggctcaaggttcgggtcctggatgacagacccactggccccagaaggtgataaccgggtctggtacatggatggttatcacaacaaccgctttgtccgtgagtacaagtccatggtggacttcatgaacacggataattttacctcgcaccgtctcccacacccctggtcgggcacgggccaggtggtctacaatggctccatctatttcaacaaattccagagtcacattatcattaggtttgacctgaagacagagacgatcctgaagacgcggagcctggactacgctggctacaacaacatgtaccactatgcctggggcggccactcagacatcgacctcatggtggacgagaacgggctctgggccgtctacgccacaaaccagaacgcaggcaacattgtcatcagcaagctggatcctgtctcactgcaaatcctccagacctggaacaccagctaccccaagcgcagcgccggcgaggccttcatcatctgcggcaccctctacgtcaccaacggttactcggggggcaccaaggtccactatgcctaccaaaccaacgcctcgacctacgagtacattgacatccccttccagaacaaatactctcacatctccatgctggactacaaccctaaagaccgcgcgctgtacgcctggaacaacggccatcagaccctctacaacgtcaccctcttccacgtcatccgctccgatgagttgtagctcccgcttttccagaagccaagggtccaagtcctcaccccgaggacattttccataaaacagctgccaaatgattccaagaatactataacagtcctgattttgagaaatcagcgcaattttgacgccgagagatggtgtcctctctgtgttcctcctgctcgtgcaggtgggccacagatttcagaagaaaccgccatgtatgtggatggaactgcagcccaaggctccttggctgtccccatcccaccccatccctctctggtccaataactcaaagaagcaaggcgatgactgttggcccctctcacccaagaacaacccactgctaagattgcatggacatttccttaggtcgtgcccagcgagatgacgtgatggccattctccccacccacagcccccagcccccgtggcgctcggtgtaggctgcttcggcccacacgtatcgcagctgcctttttcttgactgtgttgttgtctcttagattaactgtgctgagactcccggtagctcatggacctgtgtctagtactttcccgaagcgatggtgggtgtgcgtagagtgaagttgctgtacccacgttgttgaacttgcgtaccctgtagctagatcgtgaggtgtccgtctgttatcccccccaaggtggtaactccgtgtgttcaatttatgcaatgaatgttgtcatgcgatgctgtagtttggattgataagtggatggtttctgtttctaaaaagaaaaaaaaatcagtgttcgcccttataggagacatagtcaagttcatgttgataataacccagtgaaattcttctcttgtcaagttatctgaattgtgtaaccatagatgggaaggacgcatcttgggaaacttcagtttcctacgggaaggaactccccaagggcagccatgtgtgaaaagatcattttttaaagaaaaaaaaaataagtcaaagagggcaactttgtactattcagttatctaaggaacaataaagatattaggagat

SEQ ID NO: 995 - DNA, 1803 bp, Rattus norvegicus
gggggctgagcaggatgttgactggctatcgttcattgagcactctcacgatcagcatcacgcacggaatccatccttcctgtgttgcagcttgtagaccctgatgcttgggctgccagcataaacgtggggatccagactctgtctaccgaggctgcccatagggacaggccctgggaagaggagctgagaccaggctaaaaagaacccaagaaatgaagcgcctcctcacgctggcttggttcctggcttgcagtgtgcctgcagtcccagggggcttgctagaactgaagtccatgattgagaaggtgactgggaagaatgccgtaaagaactatggcttctacggctgctactgtggctggggcggccacgggacccctaaggatggcactgattggtgctgtcggatgcacgaccgttgttatgggctactggaggagaaacactgtgccatccggacccagtcctatgactacagattcacacaggacttagtcatctgcgaacacgactccttctgtccagtgaggctttgtgcttgtgaccggaagctggtctactgcctgaggagaaacctctggagttacaaccgtctttaccagtattaccccaacttcctctgctaatgtcctctgtgggctctcgccgggagtgcctcccacagtggcggcccccctcggctgtattcctgatccgtccacccaaggtcttggatctgccttcctctgtgtaccactgggctggacagagcccagggttacaccctaccctccagaatcctagagagggactctgatgtagagtctgcggactctggatagctgagcctgcacttgcagaatttggcgctgggccccggagctccctcagctccaggccagtgtcgtgttgactttcctttcaatttctggaacccaactgccattaccaccctccagagacctcttactagaggagaagccaaattaactctataaatctgccatgtagctattaaataaaacccattcacgaggcgagaagaacaccaccccagcactccctctgacagggctggggtaggagtgccaatgcttctctaacccctgaggcatctgtgcaccctctaggatggaggtcaggaaacaggtgggggccttacatgcctttcatggtttgtcttgagtttattttcttaaaccttagggtctttcaagccagacctggagctcaagattcttctggaggaaggtgagacacagccctatgccaccttgacgctccaggctagaaagggacagcccctagccctggcttctgcaactgtgtggtcttgaacctccgtatagtccgaatccctctggctctcctcaaaatataaaacaagcctccttccaatagcatattggtgcacacccctaatcccatcacctgggaggaggaggcggcaggagcatcaggagttcaaggccagctcctgccccctagcagggatggtaggctgcatgagagtgtgtctcagaaagaaccacctggtgcgggtacagggatgctgggattctgagatgtcactcagtgcgggaaaagattcaaggaggggaacagatcaatggcagaatgactgtctgtgccgagttaagggcactgaaaatctcagctcatctatcgctttatagaagatagagctttgggaggaagcaaggcactctacagtaaaggagtggcctttccaaggaagggtctaggctccttcttctccagaacatgcacaggacataggagatccattatttagagacctttcgtgttcgaacgttttct

SEQ ID NO: 996 - DNA, 607 bp, Rattus norvegicus
ggatccgtatgaccatggaaacagttgaatcacagcaggatcgaagtgtaacacattctgtggcagagcatagctccttgcatatgcagactggccaaatttctgtccctactctagctcaggatgaggagactgaccttgccccaagtcacatggctgctgccacaggtgacatgccaacttaccagatccgagctcctactactgctttgccacaaggtgtggtgatggctgcctcaccagggagtctgtacagtccccagcaactagcagaagaagcaactcgaaagcgggagctgaggctgatgaaaaacagggaagctgcccgggagtgtcgcaggaagaagaaagaatatgtcaaatgtcttgaaaatcgtgtggctgtgcttgaaaatcaaaacaagaccctcattgaggaactcaaggccctcaaagacctttattgccataaagcagagtaactgtgtttgacttggacctggttgactgtgaactctaatcggggcaggcgatgcagcatcctcgtaatggccatatggacttgtagatgggtctcttaacccttgcttaagaatacagtctgctgtagagtgtgaattgggaattc

SEQ ID NO: 997 - DNA, 7851 bp, Rattus norvegicus
cctagaccctggccagtcaccggcgtcccctgtctcggtgttcccactctctgcaccctaagctgtacccctgcggctggcgaggggccgcggacccggctggagatgcgaatcctgcagagcttcctcgcgtgcgttcagctactgtgcgtgtgtcgcctggactgggcttatggatactacagacaacagagaaaacttgttgaagagattggctggtcctatacaggagcactaaatcaaaaaaattggggaaagaaatatccaatatgtaatagcccaaagcagtctcctattaatattgatgaagatcttacacaagtaaatgtgaatcttaagaaactgaaatttcagggttgggaaaaaccatccttggaaaacacgtttattcacaacactgggaaaacagtggaaataaatctcaccaatgactactatctcagtggaggactttcagaaaaggtcttcaaggcaagcaaaatgacttttcactgggggaaatgcaatgtgtcatcggaaggatcggaacacagcttagaagggcagaagtttccactcgagatgcaaatctactgcttcgatgcggaccgattttcaagttttgaggaaacagttaaaggaaaaggaaggttaagggctctatccattttatttgagattggagttgaagaaaatttggattacaaagccattattgatgggactgaaagtgttagtcgttttggaaagcaggctgccttagatccgttcatcttgcagaacctcctgccaaactccactgacaagtactacatttacaacggatcactgacatcccctccctgcacagacaccgtcgaatggattgtttttaaggatacagttagcatctctgaaagccagctggctgtattttgtgaagttctcacaatgcaacagtccgggtatgtcatgttgatggattacttacaaaacaatttccgagaacaacagtacaagttttccaggcaggtgttttcttcgtacactgggaaggaagagattcatgaagcagtgtgcagttcagaaccagaaaatgtgcaagctgaccctgagaattacaccagccttctgatcacatgggaaaggcctcgggttgtttatgacacaatgattgagaagtttgcggttctgtaccagccactggagggaaacgaccaaaccaagcatgagtttttaacagatggctatcaggacttgggtgccattctcaataacttaatacctaacatgagttatgtgctccaaatagtggccatatgctctaatggcctttatggaaagtacagtgaccaattgatagtcgacatgcctactgaggatgctgaacttgacctctttcctgaattaattggaactgaagaaataatcaaggaggaaaactatggaaaaggcaatgaagaagacactggcttgaatcccggtagagacagtgccacaaaccaaataaggaaaaaggaaccccaggtttctaccacaactcactataatcacatggggactaaatataatgaagccaagactaaccgatctccaacgagaggatctgaattctctggaaagagtgatgttctcaacacatccctgaatcctacttcccaacaggttgctgaattcaatccagaaagagaaatgtccttgccttctcagattggaactaacctgccaccacacagtgtggaaggcacctcagcctccttaaacagtggctctaaaactctccttgtcttcccacagatgaacttgtctgggactgcagaatccttaaatatggtttccataacagagtacaaagaggtgtctgctgacctcagtgaggaagaaaacttactgactgatttcaagctcgatagtggagcagatgattcgtcaggctctagccctgcatcctccactgtccccttttccacagataatctatcccatggatatacgtcttcttcagacacgcccgaggcggtcacgtatgatgtccttaggccagaatctacgagaaatgctctagaggattcggctccatcaggttcagaagaatcactaaaggatccctctcttgaagggagtgtgtggttccctggatccacagacctaacaacacagtctgagactggatctgggagagagggctttctccaagttaactccacggacttccaagttgatgaatcgagggagacaactgagacattttctccagatgctaccgcgtcccggggtccttcggtcacagatatggaaatgccacattattctacctttgcctaccccccgactgaagtaacatcacatgctttcactccgtcctccagaccacttgatttggctcccactagcaacatcctccattcgcagacaactcaaccagtatacaatggtgagacacctcttcaaccttcctacagtagtgaagtctttcctctagtcacccctttgttgcttgacaatcagaccctcaacactacccctgctgcttcaagtagtgattcggccttgcatgctacgcctgtattccccagtgttggtgtgtcatttgactccatcctgtcttcctatgatgatgcacctctgctcccattttcctctgcttccttcagtagtgacttgtttcaccatctgcatacggtttctcaaacccttccgcaagttacttcagctgctgagagggatgagctgtctttgcatgcttctctgctggtggctgggggtgatttgctgttagagcccagccttgttcagtattctgatgtgatgtcacatcaggtcactattcatgctgcttcggacacattggaatttggtagtgagtctgctgtcctttataaaacgtctatggtttctcaaatcgaatcacccagcagtgatgtcgttatgcatgcatattcgtcagggcctgaaacttcttatgccattgagggctcccaccacgtgctcactgtttcttccagttctgcaatacctgtgcatgattctgtcggtgtagctgatcaggggtccttacttatcaatcctagccatatatcactgcctgagtcctcatttattactccaactgcatcattactgcagcttcctcctgccctctctggtgatggggagtggtctggagcctcctctgatagtgaattgcttttacctgacacagatgggctgagaactcttaacatgtcttcacctgtttctgtagctgattttacatacacgacatctgtgtctggcgatgatattaagccgctttctaaaggtgaaatgatgtatggaaatgagaccgaactgaaaatgtcttctttcagtgacatggcatacccttctaaaagcacagtcgtgccaaagatgtctgatattgtaaataagtggagtgaatctttaaaagaaacctctgtttccgtatctagcataaacagcgtgtttacagagtctcttgtttatcccataactaaggtttttgatcaggagattagtcgagttccagagattatcttcccagttaaacctacacacacagcatctcaagcatctggtgacacttggcttaaacccgggcttagcacaaactcagagcctgcgctctctgacactgcttctagtgaagtatcacacccttcaacacagcccttgctctatgaggccgcatctccttttaatacggaagcattgctgcaaccttcctttccggcttctgatgttgacaccttgcttaaaactgcccttccctctgggcctcgtgatccagtgctgactgaaacccccatggttgagcaaagtagctcttccgtatctcttcccctggcatcagagtctgcttcaagcaaaagcacgctgcactttacatctgtaccagttctcaatatgtcaccttctgatgtgcaccccacttcacttcaacgcttaacagttcctcactcgagggaggaatattttgaacaaggtttgcttaagagcaaaagtccccagcaagtcctgccgtccttgcacagccatgacgagtttttccaaactgcacatctggacattagccaggcctaccctccaaaaggaaggcatgcatttgctactcctattttatcaatcaatgaaccacaaaatacacttataaacaggcttgtgtattctgaggacattttcatgcaccctgaaatttctattactgataaggcacttactggtctaccaacgaccgtttctgatgtacttatagctactgaccattctgttccattaggaagtgggcccatttccatgacaactgtttctcccaacagagatgattctgtgaccacaaccaagttgcttcttccttctaaagctacttctaagccgactcatagtgccagatctgatgccgatttagtaggaggtggtgaagatggtgatgactatgatgatgatgattatgatgacatagatagtgatcgctttcccgtaaataagtgtatgtcatgttcaccctatagagaatcacaggaaaaggtaatgaatgactcggacacccaagaaagcagtcttgtggatcagagtgacccaatttcacatttgctctctgagaataccgaagaagaaaatggaggcacgggtgtaactagggtggataaaagtcctgataagtcaccaccaccaagtatgctaccccagaagcacaatgatggaagagaggaccgtgacattcagatgggtagtgctgtccttcctcacaccccaggatctaaagcatgggcagttttgacaagtgatgaagagagtgggtcagggcaaggcacctcagatagccttaatgataatgagacttccacagatttcagtttcccagatgttaatgaaaaggatgctgatggtgtcctggaagcagatgacacaggcatagctccgggatctccacggtcctccacaccatctgttactagtgggcattcaggagtatccaacagttcagaggcagaggccagtaatagtagccatgagtctcgtattggtctagctgaggggttggagtctgagaagaaggcggttataccccttgtgatcgtgtctgccctgacttttatctgtctagtggttcttgttggtattctcatctactggagaaaatgcttccagacggctcacttttatttagaagacaatacatcccctcgagtaatatctacaccaccaacacccatctttccaatttcagatgatattggagcaattccaataaagcattttccaaagcacgtagcagacttacatgcaagtaatgggttcactgaagaatttgagacactgaaagagttttaccaggaagtgcagagctgcactgttgacttaggtattacagcagacagctccaatcacccagacaacaagcacaagaacagatatgtcaacatcgtagcctatgatcatagcagggttaagctcacacaacttgctgaaaaagatggaaaactgactgattacatcaatgccaattatgttgatggttacaacaggccaaaggcttacattgctgcccagggtccactgaagtccacagcagaagatttctggagaatgatatgggagcataatgtggaagtcatcgttatgataacaaacctcgtggagaaaggaagaagaaaatgtgaccagtactggcctactgatggcagtgaagaatacgggagcttcctggtcaaccagaagaatgttcaggtgcttgcttattatactgtgaggaatttcaccctaagaaacacaaagataaaaaagggctctcagaaaggaagatccagtggacgcctagtcactcagtatcattacacccagtggcctgatatgggtgttcccgagtactccctacccgtgctggcctttgtgaggaagactgctcaggccaagcgacatgcagtcgggccagttgttgtccactgcagcgctggcgtggggagaacgggcacatacattgtactagacagtatgctacagcagattcaacacgaaggaaccgtcaacatatttggtttcttaaaacacattcgttctcaaaggaattatttggtgcaaacagaggagcaatacgtcttcattcacgacacactggttgaggccatactcagcaaagagacagaggtgcctgacagccacatccattcctatgttaatacactcctcatacccggaccatcaggcaagacaaaactagagaaacaattccagcttctgagtcagtcaaatattcttcagagtgactactccacggccctgaagcagtgtaacagggagaagaacagaacatcctccatcatccccgtggaaagatcgagggtgggcatttcatccctgagtggggaaggcacagactacatcaatgcatcctatattatgggttattaccagagcaatgaattcatcatcacccagcacccccttctacacaccatcaaggacttctggagaatgatatgggatcataatgcccagctggtggttatgattccagatggtcaaaacatggcagaggatgaatttgtttactggccaaataaagatgagcccataaattgcgagagcttcaaagtcacgcttatgtctgaagaacacaaatgtctttcgaatgaggaaaaactgatagttcaagacttcatcttggaagcgacacaggatgattatgtgctggaagtaaggcattttcagtgcccgaaatggccaaatccagatagtcccattagtaaaacatttgaacttataagtattatcaaagaagaagctgctaacagagatgggcccatgattgttcacgatgagcatggaggagtaacagcagggacattttgtgctctcacaacccttatgcaccaactagaaaaagaaaactccatggatgtttaccaagtagccaagatgatcaatttgatgaggccgggagtcttcactgacattgagcagtaccagtttctctacaaagtggtcctcagcctggtcagcacaaggcaggaagagaatccatccacctccctggatagtaatggtgcagctttgcctgatggaaatatagctgaaagcctggagtctttagtctgacgcagaaagggtgtaggaccaccctcatccaagcagtgtctctttctaaacttagaaaaatgagtccagttctgttatctgtttacttcccatgacctgacggtaactcattctgctgccaaattgacaccattaacaacgtgtgcctttttgaaagacttcttgtaatccacttattatgtttgaactaaaatgattgaattttacaatgtttctaagaattgaattgtggcatttttttccatattgattttaacaacaacaacaaaaaaaatttgtagataataggaaacaccaaccttgggagatatttgttcttaagtgtcaaatttttagctgtatttgtagcaatcatcaggtttgctagaaatataacttttaatatagtagattgtaagtaaaccactttatccccgatgatattcaacattttacaactgcagtattcacctgaagtaggagtgacagtaacttatgtaaatactgccctggtgtctccatggaccaaatttatatttataattgtagatttttatattttactactgtgtgagttttctagtggtgtacttgagtttaattagcttactctctggtcttaacttactctaaatgtcttctaaaactgtactgtgttatccaagaaactaaccttctttctgcatgtcattttaacttttgtgaaaataggaaaccacttgttttaaaagatgtttttatgagaataacaccttaccaaacattccttaaatggtttttatctgagaagttgcaaaaataaatataaatattgcc

SEQ ID NO: 998 - DNA, 843 bp, Rattus norvegicus
gggccgaggtgccgcggggttgctggagggtcgtgggcggcgtgcaggagacatgtcggcgggcagcagttgcagccagactcccagccgggctatccccactcgccgcgtagccctcggcgacggcgtgcagctcccgcccggggactacagcaccacccccggcggcacgctcttcagcaccaccccgggaggaaccagaatcatctatgaccggaaattcctgatggagtgtcggaactcgcctgtggccaaaacacccccaaaggacctgccaaccattccaggggtcactagccctaccagcgatgagcctcccatgcaggccagccagagccatctgcacagcagcccggaagataagcgggcaggtggtgaagagtcacagtttgagatggacatttaagggaccagccataggacgcagtgatgcttctgggcccctggggcccttgggaggagagccacagcagtcaggccttgtacccggcagacactgggtgtggatcggccacccagtcctgctcctcactcagggcacctgctctgccttccattttgtgaataccagcacatacctccttgtgcctctgttgatactgagctgctactccagggtaatgactctcacctacaccctccctgcatcaagcgccagcgagtggacacagaggagtctgtcggaatgatctggcaattctagccccaacctctggagcacacccaccttaccttaggttggggtacctgggaaagccaccctttacttctttccctgagaggaaataaaagccacatttaccctaggcccacagccgggccctgtctgaaaaaaaaaaaaaa

SEQ ID NO: 999 - DNA, 1612 bp, Rattus norvegicus
aggcaaagggcaactgcttggaatttcagaaaatctgaaaccatgaggcatctatggctgctgctcctgtctgtttccttagttcaaactcaagctgcaactactgactccgataaagtggacctctcgattgcccgtggtcatcgacctgttgacaggagaaaggaagagcctcctagcctaagacctgcccctcctcctatcagcggaggtggctatcgagcccgtccagccaaagttgatgcaggtcagaagaaagtggaacgaaaaccccctgatgcaggaggctgtgttcacggtgacggagacatgggagtgctatgtgctacagggtgtgagttgcgtcaaactttgctaaaccacgaaaggccaatcaaaaacagtattgctgagttaaatagcaacataaactctgtttatgagacctcttcggtcacctttcagtacctgactctgctgaaagacatgtggaaaaagaagcaggcacaagttaaagataatgaaaatgtcataaatgagtattcctccattttggaagaccagaaattatatattgatgagactgtgaacgataatatcccccttaatcttcgtgtgctccgctcaatcctggaggacctgagaagcaaaatgcaaaaattggagtctgacatctcagctcagacggaatactgccacactccatgcaccgtcaactgcaacatcccggtggtgtctgggaaagagtgtgaagagatcattcggaagggaggtgagacatccgaaatgtatctcattcagcctgacacctccagcaaaccatacagagtgtactgcgacatgaagaccgaaaacggaggatggacggtcatacagaaccgtcaggatggcagcgtcgactttggcaggaaatgggacccatacaaaaaaggatttggaaatattgcaaccaacgaagatacgaagaagtactgtggcttgccaggcgaatattggcttggcaatgataagattagccagctcaccaggataggacccacagaactcctaatcgaaatggaggactggaaaggagacaaggtgaaggcacactatggaggcttcacggtgcagaccgaggccaacaagtaccaagtgtcagtgaacaagtacaaagggactgctggcaacgccctcatggaaggggcctctcagctggtgggggagaacagaaccatgaccatccacaacggcatgttcttcagcacctacgacagggacaacgatggctgggtaactacagatccaagaaagcagtgctcaaaagaagatggcggcggctggtggtataacagatgccatgcagccaatccgaatggcagatactactggggtggcctttacagctgggacatgtccaagcacggcacagatgatggtgtggtgtggatgaactggaagggatcgtggtactccatgagaaggatgtctatgaagatcaggcccgtcttcccacagcaatagtcccccaagcatagactttcagccttctatgtctgacattttttacattatgttattggaattttctttgatacattatatccactaatgctcaaaacaatggctgagtgtgtctttttttttttttttt

SEQ ID NO: 1000 - DNA, 877 bp, Rattus norvegicus
gaattcggcacgagggtcgtccgcgtgtccggctcttgcccacgcagtcatggcctccggcaacgcgcacatcggaaagcctgcccctgacttcacgggcaccgccgtggtggatggtgcctttaaggaaatcaagctttcagactacagagggaagtacgtggtcctctttttctatccactggacttcacttttgtttgccccacggagatcatcgcttttagcgaccacgctgaggacttccgaaagctaggctgcgaggtgctgggagtgtctgtggactctcagttcacccacctggcctggatcaataccccacggaaggagggaggcttgggcccactgaatatccctctgcttgctgatgtgactaaaagcttgtcccagaattacggcgtgttgaaaaatgatgagggcatcgcttacaggggcctctttatcatcgatgccaagggtgtccttcgccagatcacagtcaacgacctacctgtgggacgctctgtagatgaggctctccgcctcgtccaggcctttcagtatacagatgagcatggggaagtctgtcctgctggctggaagcccggcagtgacaccatcaaacccaatgtggatgacagcaaggaatacttctccaaacacaactgagatgggtaaacatcggtgagcctgaatcccggatctcacctgcgcccttacctggatgtcctgtgctggcccagaaaacgctagatcttcctctacattctaaaggggctggaggctaggccgaggctttctcattacccacctggaatctggtgaatagtgaccctgccctgagcacacccagctgggcccaggtctataggaaaccaataaagtattagggacagtgta

SEQ ID NO: 1001 - DNA, 5795 bp, Rattus norvegicus
ttaacatcttctcagagccaacacactggtagcatgaagaccacccacaatcctcaaaccaccagaaacacagaggtgactacaactctttctgcctcctcaagtgaccaagttcaggtagagacaacttcccagacaacactatccgatgcaacaacgacctcacatgctcccagagagagcagctcacctccaagtacatcagatattttaaccaccatggcctccacagaaggcacctcaggagacacaggacacacaatggcagtaactactcaaggttccacacctgccaccacagagatctcagtgacaccttcaacccagaaaatgtcacctgtgtcaacattcagcacttctacacaggaaataacaacactttcccaaagtcaacacactggaggcatgaagaccacccgcaatcctcaaaccaccggaaccacagaggtgactacaactctttcagcctcctcaagtgaccaagttcaggcagagacaagttcccagacaacactatctcctgatacaacaaccacctcacatgctcccagagagagcagctcacctccaagtacttcagacatgttaaccaccacggcctccacagaaggcacctcaggagacacaggacacacaacggcagtaactactcagggttctatacctgctaccacacagttatcaacaacattcgcatctcaaaaaatgtcaacagtgtcaacacccaccacctcctcaattcaggaattgtcaacacttcctcagagccaacacactggcagcatggagatcagtagcagacctcaaaccacctcagtcacatcaactctttcatcctctccaagtggctcaactcctgtacagactcggtccgtgacatcatcctcagatgaaagaaccaacccaacttcttctggtgtcagtaacacatccccagctacaacagaagtgctcaccccaacatcctctccagagtctactccaggaaacacagctccgaggacaactgagacctctacaacaaccacgacaaaagtcttaatgacatctttacaacagaaactaccaacagggtcaacactcggcacttctacacccacagaggtgactacaactctttcagcctcctcaagtgaccaagttcaggtagagacaacttcccagacaacactatctcctgatgcaacaaccacctcacatgctcccagagagagcagctcacctccaagtacatcagttatattaaccaccatggcctccacagaaggcacctcaggagacacaggacacacaacagcagtaactgaccaaggttccacacctgccaccacagagatctcagtgacaccttcaacccagaaaatgtcaactgtgtcaacacttgtcacttctactcaagaattaacttcttctcagagccaacgcactggaagcatggggaccagcagcaaacctcaagccaccacaccgacagaggtgaccacatccactctttcatcgttttcaaggggatccttattttctgcgcgtaactgctgcttgcaaacaaaaaaaccaccgctaccagcggtggtttgtttgccggatccgagctcggtaccaagcttgatgcatagcagcaaacctcaagccaccacaccgacagaggtgaccacatccactctttcatcattttcaaggggatccactcaaacccagacagtttcttgggaaacatcctcctcaggaaaaataactgccccatctacttccagtaggaggaccccatccgtagccacatcagacatattcaccaccacagactccacctcaggaaacgcggggcacacacttttaacgggaagccacagtgtgatcacatcaagagtcgcaagcacaactctaggccgattgtcaactgtagcgcacagacagtctactcagcgatcatctacacattctcagagttacttgactgaaagcatgggggcatccagcacgtctgaaaccagcctcctcacagaggctaccacagagacgagtttatgcctcttcacctggacccactgtgacagagaccttctctcgtggacgtcctcttcaggattgaccacgaaaacagacaatgacagaagtacagcactctcagccacctccttgacccttccggctcccagcacgtccacagcctccaggtccacagtgcctccagcccctcttccaccagatcagggtatttccctctttcagattggctttcccctcggctctctctgcgggattccttctattttacagataacggtcagatcattttccccgagtcagactacgatgtcttctcctaccccaacccacctcaaagaggcttcacaggaagggagcgtgtgccatagtggccattctggggtgatgctgatttctctagctccaggggaaccatattttaggaccactacatcacattttacgatgagcagcaccagcctaattcggaaggtggagtctctgattaatgagtttacaagtgactggagcttcaagccaagtgacactgaagtcacctgggtcaatgttcctgcctatccagcccaggggaggactttgggagccaatacctaccaagccatcctctccacagatgggagcaggtcctacgccctgtttctctaccagagcggtggcatgaggtgggatgtgacccagggactgtacaaccgagtgctcatgggcttctccagtggagatgggtattttgaaaacagcccgctgatattccggccagcagtggagaagtaccgtccagatcgattcctaactccaaattacggatccggggactcgaggtctacaggctacacagggaggtgtggcccaactacaggctcaagtgtctgcagtggttggaaagtcagcctcagcagcccagctggggctggaacaagatttcctgcccttgctcctggcagcagggacttcggttctggctcatcaacacaggtctgtggggcaggcagctatgcagcttctctccgggcagggcgtgtgctgtacgtatggcacctgggtgagtttcgagaaggctggagaatgcacagtccttggcagtttgatgaggacgaaggaaggcacagaactggcttggccgctggaacgacaagccctctttctgcgtccagtaccagctcaggcggccccgagttagttgtgctgggtaccaggcccccccggcccgcttggacatttggtgatccccacatcaccactttggataacgccaaatacaccttcaacgggctaggatacttcctgctggttcaggcccaggacagaaattcttccttcctgctggagggccgcactgcccagactgattctgccaatgccacgaacttcattgcctttgcggcccaatacaacaccagcagcctgaagtctcccatcacagttcagtggtttcttgagcccaatgacacaatccgagttgtacacaataaccaaacggtggcctttaacaccagcgacactgaagacttgcccgtattcaatgccactggtgtcctactgatccaaaatggctcccaagtctcagccaactttgatgggacagtgaccatctctgtgattgctctctccaacatccttcacgcctcctccagcctgtcagaggagtaccgcaaccacacaaagggccttctgggagtctggaatgacaatccagaagatgacttcagaatgcccaatggctccaccatcccctccaacacgtccgaggagactcttttccactatggaatgacatcggaaactaacgggataggcctccttggggtgaggacagaccctctgccttctgagtttactcccatcttcttgtcccaactgtggaacaagagcggcgccggtgaagacttgatctctgggtgcaacgaggacgcacagtgcaagtttgacatcctggccacaggaaacagagacatcggacaaagcaccaactcaatccttagaacattccggcacgtgaatggcacgctcaaccagtacccaccccctatccactacagcagcaagattcaagcctacaaggggcgagaacagtggccattgagatcaccagcaactctaaggatgtcgtattcagcctctccaacaagtgcagtggcctttgagctctttgaaaacgggagtttgcacgtggacaccaacatccccagaagaacgtacctggagattctagcaagggatgtcaagactaacttgtcatcggtactccagcctgagacggtggcttgcttctgtagtaaggaggaacagtgtttgtacaacgagaccagcaaagagggcaactcttccactgaggtgaccagctgcaagtgcgatgggaactccttcggccgcttgtgtgaacactctaaggacctctgcactgagccatgcttccctaatgtggactgcattcctgggaagggctgtcaggcctgccctccaaacatgactggagatgggcgtcattgtgtagctgtggagatctctgaattctgccagaaccattcctgtcctgtgaattactgctataaccatggccattgcgacatctctgggcctccagactgccagcccacttgcacctgcgcccctgccttcactggtaaccgctgcttcctggccgggaacaatttcactcccatcatctataaagagcttcccttgaggaccatcacgctctctctcagggaggacgaaaacgcctctaacgctgacgtcaatgcctcggtggcaaacgtactagagaacttggacatgcgggcttttctctccaacagcttagtggagctgatacgaacctctcccggagcaccagtccttggcaagcccattcatcactggaaggtcgtctcccacttcaagtaccgtcccaggggacccctcatccactatctgaacaaccaactgataagcgccgtgatggaggccttcctcctccaggctcggcaggagaggcggaagaggagtggagaagccaggaagaacgtccgcttcttccccatctcgagggcagacgtccaggacgggatggccctgaacctaagtatgctggacgagtacttcacgtgcgatggctacaaaggctaccacttggtctacagcccccaggatggcgtcacctgtgtgtccccatgtagtgagggctactgtcacaatggaggccaatgcaagcacctgccagatgggccccagtgcacgtgcgcaaccttcagcatctacacatcctggggcgaacgctgtgagcatctaagcgtgaaacttggggcattcttcgggatcctctttggagccctgggtgccctcttgctactggccatcttagcatgtgtggtctttcacttctgcggctgctccatgaacaagttctcctaccctctggactcagaactgtgaggcctcgtcccagatgggcagctgcacctagaatacctcaggacccgcccaccggtctgcccctgctctagggagactggaaagggccgactcgatgaagatgatttgagattcttcaagcatgaataaagggagtgaaaccagactctaccattttagtaggccatgggtataggttttccggagatgaggaaatgtagagatggatggattcctatacagcacatgggaaaggatattgcctatgtacacacacacacacacacacaccagagttaatggatgactggctttatattcaccaaaatgtttttacttataaaaccagcatacttctcattaaaatctatttaaatataaaaaaaaaaccggaattc

SEQ ID NO: 1002 - DNA, 4185 bp, Rattus norvegicus
ctcgctccacagacaccgtcccgcggcagaggcgctttccaactcccgcgcagcagccgaaggacgcgctatgaagtcttatactccatatttcatgctcctgtggagtgctgttggaatagcaagggctgctaaaatcatcattgtgccgccaattatgtttgaaagccatttgtacattttcaagacactagcatcagccttgcacgagagaggccatcacactgtgttcctcctctcagaaggcagagacattgacccatctaatcactacagcctccagcgatacccagggatcttcaacagtaccacctcagatgctttcctgcagtctaaaatgcggaatattttctctggaagattgacagcagttgaactggttgacatactggatcactatactaagaattgtgacatgatggttggcaaccaagccctaatccagggtttgaaaaaagaaaagtttgacctgctactggttgaccccaatgatatgtgtggatttgtgatcgctcatcttttaggcgttaagtatgctgtgttttctactggcctttggtatcctgctgaagttggagcgcctgctcctttagcttatgtcccagagtttaactcactcctcacagaccgcatgaacttcctggaaaggatgaaaaatacaggcgtttacctcatatccagaatgggggttagctttctggttcttccgaaatatgaaaggataatgcagaagtacaacctgctccctgcaaagtccatgtatgatttggttcatgggtccagcttgtggatgttatgtactgacgtagcactggagtttccaaggcccaccctgcctaacgttgtatatgttggaggaatcctaacaaagccggccagcccactgccagaagatctgcagaggtgggtagatggtgctcaggagcatggctttgtcctggtatcttttggagctggtgtcaagtatctgtcagaagacattgctaacaaactggcaggagctctggggagattgcctcagaaagtgatttggaggttttctggaaccaaaccaaagaacctaggaaacaacactaagctcatagaatggttacctcaaaatgacctgcttggccattcaaacatcagagccttcctaagccatggtggtttgaacagtatatttgaaactatgtatcatggtgtccctgtagtaggaatcccactctttggagaccattatgatactatgactagagtacaggcgaaaggcatggggatcttgttagaatggaatacagttactgaaggggagctgtatgatgcactggtgaaagttatcaacaatcccagttatcggcagagggctcagaagttatcggaaattcataaggatcaacccggccaccctgtcaatcggactacctattggatagactacattcttcgccacgacggagcccatcacctccgttcggctgtccatcagatctccttctgtcagtattttctactggatattgcctttgtgcttctgcttggtgctgtcgcgctctacttcatagtgtcctatgtgacaaaatttatctatagaaaagtcaaaagtctgtgttctaggagtacgcacagcacagttaatggacactaccaaaatggaatcctcaatggcagatacaaaggaaatggtcatattaaacatgaaaaaaaggtaaaatgagccaacagcccaggcgacgggagcagatatgtccggtcattgagtttgtagtgctactctttagtctaacagctaccaaaactaaatgtcagcaaacaatcttaacaccctcatcagaccctgttaatgaaatccatggataaaatgtctgtacagagcacaaccccaagtgcaaaaatgtattttattctaacactgatgcagaaagaaggcagtgaaccatttagaagccttaattatttaaatcaattaagtgattgtgtcggacctgagttttaagtgttatgtatgtattacaggtgagggatggtgtttttctcttgataagatgcgtgtatgtttcccgtgtcgttgagttttagcttccatttgtatttagcttgtaacagtatttcaaagactgtttcctaaactcagtgtaacgaggcaagtgaaagatgggtggcacagtttttgtatttttgtttattatagacatttttatttttttcttttgtatatgcttttttcttaccaactatggatacttgcgaaggaaactcgtaatgaagtaactgagtaaaaaggttttcacatttttttctaatattttcctcctaccaataatttttctccagaagaattttctaattaggacaaagcaacaaagctcttacttttgttcaaagtactgaagagtacggctcaaacagcacttggaagcagagccatgtgcaaatgcttgtgtgacttggatatcccatcatttgagtttgaatattcaggtatcaacttctaaaattttagctttaaaataatcacctctcattccttttattatctgggtcacgatatagtacataggtgccaacatataattcctcttaagcagaacatttgcgtttctcctccttggtacctggtttgactgcaggagtttgaagtttgtcagcaaacaagacttcccatgcgacacagaaggtgacagaaattgtgccacccatttgtgcaatgagttcccgttccctcctcactccatcagcccaactcggtagcctttttggtcattgtgcttgacacgggacagtaagagtatctatttggaacagggagacgagtcacaacgttcataaattcaggacctccctgttgaaccacttactaaacggcaactgtaagcttattctacgtcactgtgtttactgagcatttgcactgcacatgcggagtgtgtgctttatttatttgtggttggaaatcccacccttgacacttgagagtagagaaatgaaatatttacttaacgtcactcaccaacctggcagagttgtgaaaaatctagaatgctgtaaatccttgtcatacactgtgacatacaactttgtgacactcccaccaggagccagtctcatgtacttagatatcaccagttttttaatgcacagtgcatacagcctactgctttctgaatacttgaaatggtatctgtacacaccagttagctactccttttcacaatcttatcacaatgttgccgttcaaagaggaaaaaagatcaggcaatgaatggtggggcagcagagcatagagtgtatgaacgagctgagtttacttttggcatttgataaagttggtaataggcactaactggatgattaaacataagttaatttccactgtgatttaaaaaaaacttaaaacaataaacaaagttgaaaatagaaaaatgttgttggaataaaatttttattcggattttattttacagtattatatataggtatatttacattataaacatgtttcttcttttaaaaaagaaaaagaaaagacacccatcatgagtagaactatgaaggaggaaaccaagaagatgttaatcacctaagtgggatatctgttcaaaaacaaaacaaaacaaaacaaaacaggtaaaggactgtagagatccgtgatagagtaagtgataaagacctttagctttcatgtgaaagaagtggatggtgagaaaagtgttctgtgttatcctctgtaaacatcaccagggtgtattagagaagatgacacaaaggggagaatattaggtgaatgctcaggaaagtctaatagcaaagacattagactagtggcaatggaaatcaagagaaactaaagatttgagaagattttaaaaatgtcaatttctgtgaaatctacttcagcatggccaacatagtgactttcaagacaggctgagctgtatagtgggaccctgtctaaaaatttcaaaagggaaaaatttaaaaaataagatatataaagagggctatctattaactagatggaatagttgggatctcttttcatccatgtgatacacacagcaaatgacaaatgttggtatggtagtcctataacattatcatggacttgaaaatttcttattttctcttattgtcagacattgtagtgttgtggtacaacttatgactcaagtttgagatgatgtttacataaagaaacatattccg

SEQ ID NO: 1003 - DNA, 4623 bp, Rattus norvegicus
ccccgccgccgagcgcacgcaaggctcgcggatacattttttaaaaagcccaactgcaaacaactctggcaatgccaaaattcccctccgagtgacagggcttgggaggaggctgcctctggctgtgctagctctcgggtcgcctgtgcctcctcggcaaccaggaaaggttgtgttctgtcaagagggatttggaaattagggggaaagctgcactcaactctattgtgacctcaaactctgtggaccgcttaagagaatatctacatattggaagcaaagtcgtggtcaaggaggatcggcatcggaggatggaagttttccccttgctcttctttctatccttctggtggtctcgaacctgggacctggcgacctccgattccatcatccacatcggagcaatttttgatgaatctgctaaaaaagatgatgaagtattccgcacagcagttggtgacctcaaccagaatgaggaaatcttacagactgagaaaatcacattttcagtgacatttgtggatggcaacaacccttttcaagctgttcaagaagcatgtgaacttatgaaccagggcatcttggccttggtcagctccattggttgcacatctgctgggtccctccagtctttggcagacgccatgcatatccctcacctcttcattcagcgttcaacagctgggaccccaagaagtggctgcggcctcaccaggagcaacagaaacgatgactataccctttcagttcgtccacctgtctacttgaatgaagtcatcctaagagtagtcacagagtatgcatggcagaaatttattatcttctatgatagtgaatatgatatccgtggcatacaggaatttttggacaaagtttcccagcagggaatggatgttgcccttcaaaaggtggaaaacaacatcaataaaatgatcaccacgctctttgacaccatgaggatagaggagttgaatcgctatcgagacactctcagaagagccatccttgttatgaaccccgccacagccaaatccttcataagtgaggtggtggagactaatctggttgcttttgactgtcactggatcatcatcaatgaggaaataaatgatgtggatgttcaggaacttgtcagaaggtccattggaaggttaacaattattcggcagacatttccagtcccccagaatataagtcagcgctgtttccgtggcaaccatcgaatttcttcaacactgtgtgatcccaaggatcccttcgcacagaatatggagatttctaacctttacatctatgacacggtgcttctgcttgcaaacgcctttcataagaagctgcaggaccggaagtggcacagcatggcgagcttgtcctgtatcaggaaaaactccaagccctggcagggagggcggtccatgctggagaccatcaagaagggtggagttaatggattgactggagatctagaatttggagaaaatggaggtaaccccaatgtccacttcgaaatccttggaaccaactatggagaagaacttggcaggggtgtccgtaaacttgggtgctggaatcctgtcacaggtctgaatggatcactgacagacaagaaactggagaataacatgcgaggtgtggttctacgcgtggtgactgtattggaggagccttttgtaatggtctctgaaaatgtcttgggaaaaccgaagaaataccagggcttctccattgatgttttagatgccctatctaactatctgggttttaactatgaaatttatgttgcaccggaccacaaatatggaagcccacaagaagatgggacatggaatggactagtaggagaacttgtttttaagagagctgacatcgggatttcagctttaaccatcactccagaccgggagaatgttgtggattttacaacacgctacatggactactcagtaggggtcctactgcgaagggcagaaaaaacagtggatatgtttgcctgccttgcaccatttgatctatctctgtgggcctgcattgccggcacagtccttcttgtgggactcctggtctacctcttgaactggcttaatcccccacggttgcaaatgggatcaatgacatctactacactctataactccatgtggtttgtgtacgggtcctttgtacagcaaggtggggaagtaccatacacaactttggcaacccgaatgatgatgggggcttggtggttatttgctctgattgtcatctcatcttatacagcaaatcttgccgctttcctcactatcacccgcattgagagctccatccagtctcttcaggatctgtccaagcaaacggatatcccttatggcacagtcttggattccgcagtatatcagcatgttcgcatgaaggggctgaatccttttgagagggacagcatgtattcccagatgtggaggatgatcaaccgaagcaatggctcagagaacaatgttctggagtcccaagcaggcattcaaaaggtaaaatatggaaactatgcttttgtatgggatgcagctgtgttggaatatgtggccatcaatgaccccgactgttccttctacactgttggaaatactgttgctgaccgggggtatggcatcgcactgcagcatggcagtccctaccgtgatgtcttttcacaaaggatcctggagctgcagcagagtggcgacatggacatcctcaagcacaaatggtggcctaagaatggccagtgtgacctgtactcctcagtagatgcaaagcagaagggaggagccctggacatcaagagtctggcaggcgtgttctgcatcctggccgcggggattgtactctcctgcctcatagccgtcctcgagacatggtggagtcggcggaagggctcccgagtcccatcgaaagaggatgacaaggaaattgacctggagcacctccatagacgtgtaaatagcttgtgcacagatgacgacagcccccataaacagttttccacctcgtcaattgacttgacccctctggacattgacactttgccaacacgacaagccctggagcagatcagtgatttcagaaacactcacatcaccaccaccaccttcatcccagagcagatccagactcttagccgcacactctcagcaaaagctgcctttggcttcactttcggcagtgtgcccgagcaccgaactggcccttttaggcacagggcccctaatgggggctttttcaggagtcctatcaaaacaatgtcatctattccttatcagcctactcccactctggggctcaatctgggcaatgaccccgaccgaggcacgtccatatgagcagcagacagctcggcctatatcctaggactgccccaaaggagcaactgtaatgtgggactaacatggatgtgatgttttatttaaaagaaatcaggataattagtaacaattctagttctttctctcccctgctctacttttttcggctctttctccctctctctgtctatcaccctccattttttggccattactcaacttgttccccaagaatatagtattctaggatccaagtagtctgcttttcatatactgtacttcaagtatagggaatgggcactgagactgagaacacttgaccagggttgacttgcatacagggctcccatgcacccaccgtccctctgtttcgaaactctaactgcaataacctcggtctttctccatcttcagccacatccataaaaccctccactactatcgagtgtcctttaactgtggaccaaaggcaacccctgcagtgtggatgaacatgattttgaagaccgttcaggccacacaatatgagatcaacggtttcgtaggattacaaaaacaaaaacaaaacaaaacaaaaaaaaaaagccattaatctgccagtcaagactacagttaaaaccccttgcactgcagcagtgcccacccccttcgtgcgattgtacagtattcaaaccttttcttatgtacagtaacttaccataggcaaaggctttattgtgttaaataacttagtatctcatatatacatatatatgcacctatataatgtgtatatatatagaaatgcagccattgctattgcaattcatttaataaagctttagtttaaaaaccaagcattgtgtacaggagctgtggcagcgcaggaggccttgtcaggtgaagaggcaggttgctttaatgtcactctgacctgcgttgtttgccaagagactttttataattcttgttattaaaacatccagggtgatttcatctttgttcctagatgtactcatttgaataggttttgcattcattattcagcagtgtataaagctaacctcgataattttaccttctgttaattatctaaacgggaaatgccatgagccgaaccccacacacagcacagagagcagagtttaaccgtagatcatggtaggttcaacgtcctcttccaaagctgcaagcgaatcactgtaactgaagctggggaggaggggaaaccccttcgaagtgtcgatgtggccttatatgtgtcatacatcaccctacagcagacacgtgacaaccatactgggctctcatctgaacccctcttcgg

SEQ ID NO: 1004 - DNA, 2059 bp, Rattus norvegicus
gcacgagtacgggctcaaatgtagaagacagaagtagctcagggtcctgggggaatggaggtcatccaagcccgtccaggaactatggagatgggactccctatgaccacatgactagcagggatcttgggtcacatgacaatctctctccaccttttgccaattccagaatacaaagtaaaacagaaaggggttcatactcatcttatgggagagaaaacgtacagggttgccaccagagtctcctcggaggggacatggatatgggcaacccaggaaccctttcgcccaccaaacctggctcccagtactacccatattccagcaataacgcccgacggaggcctcttcacagtagtaccatggaggtgcagacaaagaaagtcagaaaagttcctccaggcttgccatcttcagtctacgctccttcagccagcactgccgactacaacagggactcaccaggctattcttcctccaagccagcagccagcactttctccagctccttcttcatgcaagatggccatcacagcagtgacccttggagctcctccagtggaatgaatcagcccggctatggagggatgctaggcaactctcatatcccacagtctagcagctactgtagcctgcatccacatgaacgtctgagctatccatcgcactcctcggcagacatcaactccagtcttcctccgatgtccacgttccatcgaagtggcacaaaccattacagcacctcttcctgcacacctcctgccaacggaacagacagtataatggcaaacagaggaactggggcagcaggcagctcccagactggagacgctctggggaaagccctggcttcgatctattctcctgatcacacgaacaacagcttctcctccaacccttcaactcctgttggctcccctccttcactctcagcaggcacagctgtttggtctcgaaacggaggacaggcctcgtcatctcccaattacgaaggacccttgcactccttgcagagccgaattgaagaccgtttagaaagactggacgacgcaattcatgttctccggaaccacgcggtgggcccatccacagctgtgcccggtggccatggggacatgcatgggatcatcggaccctctcacaatggagcaatgggcagtctgggctcaggatatggaactggccttctctcagccaacagacattcactcatggtcggggcccaccgtgaagatggcgtggcactgagaggcagccattctctcctgccaaaccaggttccggttccacagcttccggtccagtctgcaacttcccctgacttgaacccaccccaagacccttacagagggatgccaccaggcctccagggacagagtgtgtcttccggcagctctgagatcaagtccgacgacgagggcgatgagaacctacaggacacaaaatcttccgaggacaagaaactagacgacgacaagaaggatatcaaatcaattactagcaataacgatgatgaggacctgaccccggagcagaaggccgagcgtgagaaggagcggaggatggccaataacgcccgtgagcgcctgagggtccgtgatatcaacgaggctttcaaggagctgggccgcatggtacagctccacctgaagagcgacaagccccagaccaagctcctgattctccaccaggcagtggctgtcatcctcagcctggagcagcaagtgcgagaaaggaacctgaacccaaaagctgcctgtctgaaaagaagggaggaagagaaggtgtcctcagagcctcccccgctctccttggctggcccacaccctgggatgggagacacagcgaatcacatgggtcagatgtgaaagggtccaagttgccaccttgcttcattaaaacaagagaccacttccttaacagctgtattatcctaaacccacataaacactgctccttaaccccgttttttttgtaatataagacaagtctgagtagttatgaatcgcagacgcaagaggtttcagcattcccaattatcaaaaaaaaaaaaaaaaaa

SEQ ID NO: 1005 - DNA, 3287 bp, Rattus norvegicus
atcacgacccggatccgagcatctgagactggttctgatgaagccatcaagtccatcctagaacaagccaagagggaactccaagtgcagaaaaccgctgagccagtccaggcgtcttccacagccagcagtgggaactccgacgatgccatccgctccatcctacagcaggcccgccgggaaatggaggcccagcaggctgcccttgaccccgccttaaagccagcaccactgtcccagcccgacctcaccatcctcaaccccaagctcctgtctgcctcacccatgtctactgtgtccacttacccccctcttgccatctccctgaagaaaacccctgcagcacctgaggccagtacctcagccttgcccagtgccccagccctcaaaaaagaggctcaggatgcacccacactggacccaccaggatcagctgatgctaccccgggggtactgaggccggtgaagaatgagctagtccgtggcagcacctggaaggatccttggtggaaccctgtacagcctgaaagaagaaatcttaccacttccgaagagaccaaggccgatgaaacaaatgcaagtgggaaagaaaagacaggcagcagccaacctcgggctgagcgcagccagcttcagggaccctcggcgacagcagagtactggaaagagtggcccaacgctgagtccccatactcccagagctcagagctgagcctcactggagccagccgcagtgagacaccccagaatagcccactgccctcttccccaattgtgcccatggcaaagccggccaagccttccgtgcccccgctgactcctgagcagtatgaggtctacatgtatcaggaagtggacaccatcgagctcactcggcaggtcaaagagaagttggccaaaaatggcatttgccagaggatctttggggagaaggtactgggcctgtcccagggcagcgtcagcgacatgctctcaaggccaaaaccatggagcaaactgacccagaaaggccgagaacccttcatccggatgcagctctggctgaatggagagctgggccaaggtgttctgcctgtgcaagggcaacaacaaggaccagtccttcactcagtgacgtctctgcaggaccccctccagcagggctgtgtgagttcagaaagcactccaaagacctctgccagctgcagccctgcccctgagtccccaatgagttccagcgaatctgtgaagagtctcactgagctggtccaacagccctgtcccaccattgagaccagtaaagaaggcaaaccaccagaacccagtgacccacccacctcagactcccaacccacaacaccgctgcctctctctggacactcagccctcagcatccaagaattagtagccatgtctcctgagctggacacctatggcataaccaagagggtcaaagaggtgctgacggacaacaacctcggtcagcgcttatttggagagaccattctggggctcacccagggttctgtctccgacctccttgcccgcccaaagccctggcataagcttagtctgaaaggacgggagccctttgtccgcatgcagctatggctcaacgaccccaacaatgtggagaagctgatggatatgaagcggatggagaagaaagcctacatgaagaggcgacacagctctgtcagtgacagtcagccttgtgaacccccctctgttggtatcgactatagccagggtgccagcccccagccacaacaccagctgaagaaacctcgagtggtcctggctccagaggagaaggaagcactgaagcgagcatatcagcagaagccatacccatcaccaaaaaccatcgaggagcttgccacacaactcaacctgaagactagcaccgtcatcaactggttccataattacaggtctcggatccgcagagaactgttcattgaggagattcaagccggaagccagggccaggccggtgccagcgactcaccttcagctcgaagtagccgggctgcacccagctctgaaggcgacagttgtgacggcgtggaagccgctgacaccgaggagccaggtggcaacatagtggccaccaagtctcagggagggccggcagaggtgaccgcagccccggcagaccgggaagaagcgacgcagccggccgagaaggcgaaggcacagccactatcctcggggaccccaggacaagacgacggtgaagacgcaggccggtctaggccacctcctgagggtcttgctgacgccccagcgcccgtgccaaacctcgccgcacccgcggccggagaggacgccgctacctcagccactgccccagccatggccactgaggcccctggggcggccagggccggccctgccgagaggagttctgcgttgccaagcaccagcgcgcctgccaacgcgcctgcgcgaaggcctagctctctgcagagcctctttggtctgcctgaggcagcgggcgcccgggacaacccggtgcggaagaagaaggccgcgaacttgaacagcatcatccaccgcctggagaaggctgccagccgggaggagcccattgaatgggagttctgagggcgccgggcctctgggcctgaccagcagggcctcgccgggctagccaggcctacttgcgcctagcaggtcccccaggcctagtcagcactggctagtggtgggctggggcaggcgggtgcgtggagggctgtgctgacccgaggcctggacgtgttgcgcacttaccgccctgcgggccacagggcaaaatcgccataggccaaggtgcatatagaaaacaaaggagcattaagcccaatctatgttgtgttttcaaggaagaaaacggaaatgtgtagtcaagcttttttgtaccctgaagtgttttttttttaattgccctaagtgatttccacaggttctggaataactctttacagcttttgccttgcgccctcctctttcgtgtgggctttaaaaaaaaaaaatcaaacccacatattaaaagggggctttttatctgccatctaatggcttcagagcgataatacactattatcttcttaaaccaggaagggggggattttttcagaaaaattaaaaaagaaagtttttgtagctgttcagttgccactaagagattgcacagtcaaaccgactctaaacacactagtttggattcctaaatattttcaagaaaagaatcttctcgtttgaaactttgaattaaaataaaacacatttactccacatattttttaacaaaaaaaaaaaaa

SEQ ID NO: 1006 - DNA, 635 bp, Rattus norvegicus
agaaaggcagacacaagagcaagcctgcgcgtgtgaaggcattcacagaagctgaaccggaagttgacaaccttctagtttcagatgctactccagacggtttccgtctgtcctggactgctgatgaagggatattcgacagttttgttatcaggatcagagataccaaaaagcaatctgaaccacaagaaataaccctcccttcccccgaccgtaccagggacataacaggtctcagagaggccactgagtacgaaattgaactctatggaataagccgtggaaggcgatcccagccagtcagtgccatagcaacaacagccatgggctctccgaaggaaatcatgttctcagacatcactgaaaatgcagccacagtcaactggagggcaccgactgctcaagtggagaatttccggattacttatgtgcctgtaacaggaggtcccccatccatggtgaccgtggatgggacggatactgagacccgactggtgaggctcacccctggagtggagtaccacgtcagtgtgattgccatgaagggatgtgaagaaagtgatccggtctcggggtctctaatcacagctctcgatggtccatctggccttctgagagccaacagcacggactca

SEQ ID NO: 1007 - DNA, 2198 bp, Rattus norvegicus
gccgcgtttgatttcggggaggagcggagcagagcaggacccctctgcacccactcagccgactcagccaggttcgtggagcaacttcggcatcatgaatgcagcggccaaagctggaaagctggctcgagcaccagccgacctcgggaaaggtggggttccgggagatgcagttcccggtgccccagtggccgccccgctggcgaaagaaattccggaggtcctagtggacccacgcagccggcagcagtatgtacggggccgcttcctgggtaaaggaggcttcgccaaatgcttcgaaatctcagactcagacacaaaagaggtgttcccaggcaagatcgtgcctaagtctttgctgctcaagccccatcagaaggagaaaatgtctatggagacctccattcaccgcagcctcgaacaccagcacgtcgtaggcttccatggcttttttgaggacagcgactttgtgttcgtggttttggagctctgtcgcaggaggtctctcctggagctgcacaaaaggaggaaggcgctgaccgagcccgaggcccgatactacctgcggcagatagtcctgggttgccagtacctgcaccgcaatcaagtcattcacagggacctcaaactgggcaacctctttctgaatgaggatctggaggtgaaaataggggattttggcctggcaacaaaagtggaatatgaaggggaacggaagaagaccctgtgtggcactcctaactacatagctcccgaggtgctgagcaagaagggacacagctttgaggtggacgtgtggtccattgggtgcatcatgtataccttgctggtgggcaagccaccttttgagacctcatgcctaaaagagacctacctccggatcaagaaaaatgaatacagtattcccaagcacatcaacccagtggctgcctccctcatccagaaaatgcttcagacagaccccgctgcgcgccccaccattcacgagttgctcaatgacgagttcttcacttccggatacatccccgcccgtctgcctattacctgcctcaccatcccaccaaggttttcaatagctcccagcagcctagaccccagcaacaggaagcctctcacagtccttaataaaggtgtggagaaccccctgcctgaccgtccccgagagaaagaggaaccagtggttcgggagacaaatgaggccatcgagtgccaccttagtgacttgctacagcagctgaccagtgtcaacgcctccaagccctcagagcgagggctggtgcggcaagaggaggccgaggatcctgcttgcatccctatcttctgggtcagcaaatgggtagactattcggacaagtatggccttggttatcagctatgtgacaacagtgtgggagtgctctttaatgactcaacacgcctcatcctctacaatgacggggacagcctgcagtacatagagcgtgatggcacggagtcctacctcactgtgagctcccaccccaactccttgatgaagaagatcactctcctcaactatttccgcaattacatgagtgaacacctgctgaaggcgggggccaacatcacgccccgggaaggcgacgagctggcccggctgccctacctacgaacatggttccgcacacgcagcgccatcatcctgcacctcagcaatggcacagtacagattaatttcttccaggaccacaccaaacttatccgtggccccctgatggcagcagtgacctacatcaacgagaagagggacttccggacataccgcctgagccttctggaggaatatggctgctgcaaggaactggctagccgcctccgctatgcccgcaccatggtagacaagctgctgagctcgcgttccgcctgcaaccgcctcaaggcctcctaggtctccgtccttcggactggtgccccttcattctgctagctctctgctagctctgggcctgcactactgggctcctggggccgctgttcagtgccctggccctggggctggcagggagcagtgcccctgtgaagggttgctgtgtgtaagttattttgtacatgattgggtgtggtttgcagcctgttccctgcccttggcccactgtatgaactgtataaatatttctattgaatttgggactgccctttccttagctttatatatattaaatatttgtacatctctctct

SEQ ID NO: 1008 - DNA, 4128 bp, Rattus norvegicus
gtattcatcagagactagacaagagttactcttgcttttgccaattaaagatgatgttgtcatggaaacagttgatcctgctttcattcattggctgcctggcaggtgagcttcttttgcaaggccccgtgtttgtcaaagagcccagcaacagtattttccctgttggctcggaggataaaaaaataacattaaattgtgaagcaagaggcaacccttctcctcattacaggtggcagctgaatggcagtgacattgatacaagtctggaccatcgttacaaactgaacggaggaaatctcatagttattaaccctaacagaaattgggatactggaagttaccagtgttttgcaacaaattctcttggaacaatagtcagcagagaagctaaactccaatttgcctatcttgaaaattttaagagcagaatgagaagcagagtgtcagttcgtgaaggccagggagtggtacttctctgtggacccccaccacactccggggaactttcatatgcttgggtcttcaatgagtatccatcattcgttgaagaagacagtcgaagatttgtctctcaagagacaggacacctctacatagctaaagtggagccatctgatgtgggaaattacacatgcgtggtgaccagcactgtgacaaatgccagagtattgggctccccaacccctttggtgctacgctctgatggtgtcatgggtgaatatgaacctaaaatagaactccagtttccagaaactcttccagcagctaaaggttcaactgtgaagttggaatgcttcgccctagggaaccctgttcctcagattaattggagaagaagtgatgggatgccgtttcccaccaaaattaagctgaggaagttcaatggtgtgctcgaaattccaaacttccaacaggaagatacaggctcctatgagtgcattgctgaaaattcacgaggaaagaatgtggcgagaggacggctcacttactatgcaaaaccttattgggttcaactcttaaaagatgtggaaactgctgtggaggacagtctttattgggaatgccgggcaagtgggaagcctaaaccctcctatcgatggctgaaaaatggagatgccttagtactagaggagagaatacagatagaaaatggtgcccttacaatagccaacctcaatgtgagtgactctggaatgttccagtgtatagcagagaacaagcatggcctcatctactccagtgctgagctcaaagtattagcttctgctccagatttttcaaggaaccctatgaaaaaaatgattcaggtgcaggtgggcagcctggtgatcttggattgtaaacccagcgcctctccaagggcactttctttctggaagaagggagacacggtggtgcgggagcaggcaaggatttctcttttaaatgatggaggactcaaaattatgaacgtgaccaaggctgatgctggaatctacacctgcatagcagaaaaccagtttggcaaagcgaatggcaccacccagttggttgtgacagaaccaacaagaataattttggcaccttctaacatggatgttgccgttggtgagagcatcattttaccttgccaggttcaacatgaccccctattagacataatgtttgcctggtatttcaatggaactcttacagactttaagaaagatggatcgcactttgagaaagttggtgggagttcgtcaggtgatttaatgatcagaaacattcaactgaaacacagtggaaagtatgtatgtatggtgcagacaggggtggacagcgtttcatctgcagctgagctcatagtgagaggttcacctggaccaccggaaaacgtgaaagtagatgaaattacagacacaacagcccagctctcttggacggaaggcaccgacagtcacagcccagttatatcgtatgcagtccaggctaggacacctttctctgtgggctggcaaaatgtcagaacagtacctgaggccattgatggaaaaacacgaacagctactgttgtggagttaaacccatgggtggaatatgaatttcgcgttgtagccagtaacaaaatcggaggcggagaacccagtttaccctcagaaaaagtaaggactgaagaggcagctccagaagtcgcaccttctgaggtgagcggaggaggtggaagccgatctgagctagtgataacctgggatccagtccctgaagaactccagaatggaggaggttttgggtatgtggttgcttttcgcccacttggggttaccacctggatccagacagtggtgacatccccagataatccaagatacgtctttaggaatgaaagcatcgtgcctttttcgccatatgaagttaaagtgggcgtttacaataacaaaggtgaaggaccctttagcccagtcacaactgtgttctccgcagaggaagagcctacagtcgccccatctcacatctctgcacatagtctgtcctcctcagaaattgaagtttcatggaacacaattccctggaagtcgagcaatggacgtttacttggctatgaggtgcggtactggaacaatggaggagaagaagaatcatccagcaaagtgaaagtggcaggaaatcagacatcagctgtgctccgaggcctgaaaagcaacctggcatattacacagccgtccgggcttacaacaccgcaggcgctggtcccttcagtgccacagttaacgcgaccaccaagaaaacccctcccagtcagccaccaggaaatgttgtttggaatgctacagacactaaagtgctgcttaactgggaacaagtgaaagccttggagaatgaatcagaagtaacaggctacaaggttttctataggactagcagtcaaaataatgtgcaagtactgaacacaaacaaaacttcagctgaactgttgctgcctatcaaggaagactacatcattgaagtcaaggccaccacagatggaggggacggcaccagtagtgagcagatcaggattccaagaataaccagtatggatgcaagaggatccacttcagccatttctgacatccaccctgtgtcaggttacatatccgtcctactgttctttattgtaaatgctttgtggtgatagggcttttttttattatttattggaaagttaattggttacccccccaaaagtgctttctaaaacagtgattatgcatgtttttacagctctgtgtttttaaatttctacttcattataggtaaaatatgaatataataaaaacagtaaatccttttagaggaatctgagatgccttaatatttgcttggtaaaccaaaggaacttgcaaattacaaactgcaaacgtttttgatagaaatattcttatgttgtgagtttaatcacttgcctatgtgtgaggcacatacaaacacaggatacataaaaacacagtgcacatatgatgtatggaaacacctagtacatatacagtacatacaacacacaatgcacaagcacatacatacatacacacaaacacaaacagactttttctatactaaaaaccttatttattacaaatgttcttttcccatgattacaacatcacctatcatttttaaattactaatctgatccctcagaggaaacatgcacttaaactgttattccggaagggagcagcctggaagggagtattgttagaaaatgctactctgagtttgggaaagtgacacttgcatcaatgtgctactgtatggctgtgagatttcctttgtcacttctttctctcatctttcacttatttattctataaagtgaggtgacaatatttctcctgtcgccttttactgcaagaatttattgttgaaaacaaagaaagaaggatgaaggcatggtttcttcccctatgcagtgtgggtgtgcagaatcttacatgaacctcctaaggtaaacacaaaacaggcacttttctgaagtgtgctggcattgcacgttctccttaggattgtctgtctttttccgaagatgggaattgaaccccagtgaagactgtgacagtgttcccttttgtcggtgtttacaaaaataagatgaaacatggaaatgaatacattttatccttccc

SEQ ID NO: 1009 - DNA, 3214 bp, Rattus norvegicus
gtcgcctctcgcggattaggagctagcgtctcccgcccgcctgccgccccggtgccgctgggaggaagcgagagggaggctgcctgtgggtttgtcactgctgttgctcctccacctgagtgagtcaagcccgggcctagtcggtcgcctaccattctcgtagccgttaccctcaggccgccacagccgccgaccgggagaggcgcgcgccatggcctctggagccgattcaaaaggtgatgatttatcaacagccattctcaaacagaagaaccgtcccaatcggttaattgttgatgaagccatcaatgaagataacagtgtggtgtccttgtcccagcccaagatggatgaactacagttgttcagaggtgacacggtgttgctaaaaggaaagaagagaagggaagctgtatgcattgttctttctgatgacacgtgttctgatgagaagattcgaatgaatagagttgttcggaataacctccgagttcgcctaggagatgtcatcagcatccagccatgccctgatgtaaagtatggcaaacgtatccatgtgctacccattgatgacacagtggaaggcatcactggcaatctttttgaggtataccttaagccgtacttcctggaagcatatcggcccatccgtaaaggagatattttccttgtccggggtgggatgcgtgctgtggagttcaaagtagtagagacagatcccagcccttactgtattgttgctccagacacagtgatccactgtgagggggagccaatcaagcgagaggatgaggaggagtccttgaatgaagtaggctatgatgacatcggtggttgcaggaagcagctagctcagataaaggagatggtggagctgccactgagacatcctgcactctttaaggcaattggtgtgaagcctcctcggggaatcttgctatatggacctcctgggacagggaaaaccttgattgcccgagctgtggcaaatgaaactggagccttcttctttctgatcaatggtcctgaaatcatgagcaaattggctggtgagtctgagagcaaccttcgtaaagcctttgaggaagctgaaaagaatgctcctgccatcatcttcatcgacgagcttgatgccattgcacccaaaagagagaaaactcacggggaagtggagcgtcgcatcgtgtctcagttgttgacccttatggatggcctaaagcagagagcacatgtgatagttatggcagcaaccaatagacccaacagcattgacccagccctacggcgatttggtcgctttgacagagaggtagatattggaatccctgatgctacaggacgtttggaaattcttcagatccataccaagaacatgaaactggcagatgatgtggacttggaacaggtagccaatgagactcatggtcatgtgggtgctgacttggcagccctgtgttcagaggctgctctacaggccatccggaaaaaaatggacctcattgacctagaagatgagaccattgacgctgaggtcatgaattccctggcagttactatggatgacttccggtgggccttaagtcaaagcaacccatcagcacttcgggaaactgtggtagaagtgccacaagtaacctgggaagacattggaggcctggaggatgtcaaacgggagcttcaggagttggttcagtatcctgtggagcatccagacaaattcctcaaatttggcatgactccttccaaaggtgttcttttctatggaccgcctggctgtgggaaaaccttactggccaaagccattgctaatgaatgccaggctaacttcatctccatcaagggtcctgagctgcttaccatgtggtttggggaatctgaggccaatgtcagggaaatatttgacaaggcacgacaagctgccccctgtgtactcttctttgatgagttagattcaattgccaaggctcgtggtggtaatattggagatggtggtggagctgcagaccgagtcatcaatcagatcctgacagaaatggatggcatgtccacaaaaaagaatgtgtttatcattggagctaccaaccggcctgacatcattgatcctgctatcctaagacctggccgtcttgatcagctcatttatatcccacttcctgatgagaagtcccgtgttgccatcctaaaagccaatctgcgaaaatccccagttgccaaggatgtggatttggagttcttggctaagatgactaatggcttttctggagctgacctgacagaaatttgccaacgtgcttgtaaactagccattcgtgaatctatcgagagtgagattaggcgagaacgagagaggcagacaaatccatcagctatggaagtagaagaggatgatccagtgcctgagatccgcagagatcactttgaggaagccatgcgttttgcccgacgttctgtcagtgataatgacattcggaagtatgaaatgtttgcccagacactgcagcaaagtcgaggttttggcagcttcagattcccttcagggaaccagggtggagctggcccaagtcagggcagtggaggtggcacaggtggcaatgtgtacacagaagacaatgacgatgacctctatggctaagtgatgtgccagcatgcagcgagctggcctggctggaccttgttccctgggggtgggggcgctcgcccaatgggaaccaggggtgtgcccatggcctgttccattcctcagtccgaacagttcagccccagtcagactctggacaggggttttctgttgcaaaaaaaaattacaaaagcgataaaataaaagtgattttcatttgggaggtgaagagtgaattaccagcaaggagctgggccttgggccctcaccatttctgttgtagtttgggtggtgcaggtaacctgtgtggtgtgaaccgaggcgctgcccccaccatcaccacagtaaagcatctatactcaatgctgtccaagccctcccttacctctagccagcctgggtaggtggacaaggggcctcagtttgctgggtgtttatatagaaagtaggttgatttttattttacatgcttttgagttactgttggaagactaatcataagcagtttctaaaccaaaaaaaaaaaaaaaaaaaaaagacatgttgtaaaaggataataaatgttgggtcaaaatggaaaaaaaaaaaaaaaaaaaa

SEQ ID NO: 1010 - DNA, 1713 bp, Rattus norvegicus
cttctgcagacttgtggctgctgggcggtgctctctcagctgcccaaatgtcaaacagttgttggttttcagcttgggagatgcaattagccaatgtcggttcccagcgtcttggcgagtgtgctggggtgcatgtgccgcctcggggagtcctggtccgtgtttccctcagtgacaaacagcatttcggttgtggggtttcatccgtgcagactttagcttttgtttctaattcctgaagctcgtggcattttgacactgatatctgagcccagggttgtctgtcggtctctgtgtgttttgcatgatcttggattggcaccctactgtacccaaacattaaaaagcctgtctttccgttgaagaggacaggggttaaaatgaacgaagacccgaaggtcaatttaagcgggctgcctcgggactgtatagaagctggtactccggagaacatctcagccgctgtcccctcccagggctctgttgtggagtcagaacccgagctcgttgtcaacccctgggacattgtcttgtgcagctcaggaaccctcatctgctgtgaaaatgccgtcgtggtccttatcatcttccacagccccagcctgcgagcacccatgttcctgctgataggcagcctggctcttgcagacctgctggctggtctgggactcatcatcaattttgtttttgcctacctgcttcagtcagaagccaccaagctggtcacaattggactcattgtcgcctctttctctgcctctgtctgcagtttgctggctatcactgtggaccgctacctctcgctgtattacgccctgacgtaccactccgagaggaccgtcacctttacctatgtcatgctagtgatgctctggggaacttccacctgcctggggctgctgcctgtcatgggctggaactgcctgagggacgagtccacctgcagcgtggtcagacccctcactaagaacaacgccgccattctctccatctccttcctcttcatgttcgcactgatgctccaactctacatccagatttgtaagattgtgatgaggcacgcccatcagatagccctgcagcaccacttcctggctacgtcgcactacgtgactacccggaaagggatctccaccctggctctcatcctggggacctttgccgcctgctggatgccttttaccctctattccttgatcgccgattacacctacccctccatctacacctacgccaccctcctgcccgccacgtacaattccatcatcaaccctgtcatatatgctttcagaaaccaagagatccagaaagccctctgcctcatctgctgtgggtgcatccctaacacgctgtcccagagagcacgctctcccagcgatgtgtagcagcgttctccccacaggacgctggctctactaagcgccccactgcccagggcagccggtgacttcctccccttaaattctttgcactggatctcacaggcagaagcaacgatatcttttagactagtgttggcagtggaaatcatgttaccagtgttttaaaaaactcaacttctcggcttagcattctgttgtttggtttgggagttaggagttgtttgtttgtttgtttgtttggagggtgtagtggcacctcatgtggccgtaaaattatacacaagtctcaggatttttaacctagacttgaaaataaatcagttttaacggc

SEQ ID NO: 1011 - DNA, 420 bp, Rattus norvegicus
atgagccccaccacctgcaccctgaggaaacacaagaccaacaggaagccacgcacaccgttcaccacgtcccagcttctagccttggagcgcaagttccgccagaaacagtacctctccatcgcagagcgggccgagttctccagctctctgaaccttacagaaacccaggtcaaaatctggttccagaaccgaagggctaaggcaaaaagactgcaggaggcggaactggaaaagctgaaaatggctgccaaacctatgctgccctcgggcttcagtctgcccttccctatcaactcccccttgcaagcggcatccatatacagcgcctcctaccccttccatagacctgtgcttcccatcccgcctgtgggactctatgccacgccggtgggatatggcatgtaccatctatcctaa

SEQ ID NO: 1012 - DNA, 3519 bp, Rattus norvegicus
atgagtgacggagctgcagcgaggcggtggggtaagtgtggacctccctgcagcagagagagcatcatggtggctttcaaaggcgtctggactcaagccttctggaaggcggtcacagcagagttcctggccatgctcatctttgttctgctcagcgtgggatccaccattaactggggtggctcagagaaccccctacctgtggacatggtcctcatctccctctgctttggactcagcattgccaccatggttcagtgcttcggccacatcagcggtggccacatcaacccagcggtgacagtggccatggtgtgcacacgaaagatcagcatcgccaagtctgtcttctacatcactgcgcagtgcctgggggccatcatcggagctgggatcctctacctggtcacaccccccagcgtggtgggaggattgggagtcaccacggttcatggaaacctcactgctggccatgggctcctggtggagctaataatcactttccagctggtattcaccatttttgccagctgtgattccaaacggactgatgttactggttccgttgctttagcaattgggttttccgttgcaattggacatttgtttgcaatcaattataccggagccagcatgaatccagctcgatcctttggccctgcagttatcatgggaaactgggaaaaccactggatatattgggttggaccaatcataggcgctgtgctggcaggtgcactttacgagtatgtcttctgtcctgacgtggagctcaaacgtcgcctaaaggaagccttcagcaaagctgcacagcagacgaaagggagctacatggaggtggaggacaaccggagccaagtggagacagaagacttgatcctgaagcccggggtggtgcatgtgatcgacattgaccgtggagacgagaagaaggggaaggactcgtctggagaggtattatcttctgtatgactagaggacagcactgaaaacagaagagactccctagaactggcctcagatttcctgccacccattaaggaaacagatttgttataaattagacatatgcgggtttcttgtttcacatcttgttacacagcttaaataacacatattttactattatcaatgggggggagaagcctataattaatatgacattttaatggaaatcttttttaatgtatcctcgaagcaaatattcagctactgtattgactttccttttgttagtaataactgaaactatgagccgaaatctgatcaagtcttacttaacagagcattggacatctctgtgaggaagcttgtactgcccatcctcacttcaaaactgacaccattagattgatttaaaaatgacaaaatgcagcagatcaccgaatcatgtgcgttttaggagaagaaatgtagtaagttcttccacaagctatcccttacttattaactaccttggaggagttaaaaatagcacttgccattgctaatatatcatgcgtatttatatagctgactgtcagatcccaaccccaattcactataatccttcttccccctcagcatccaagaaaccatagagctaaaagtcaaaagaaatggaaagaatattaacttctgtccatgtgttggtttcatctaatgaaacctgtacatgggacacccacccactgaggttcaggacagccagacctggggagtctggtgggaggtggagcaaaggttgctacttacagtcctacaaccatcacaagaggggcaacctctgttatgaaatgattgctctgttttcagtgcacactcttaaggataccacaaaagattaactgcctaagcctttaactacttcacttgcttttaaagcttatttgcaaaattggggaatttgtttgccatttgggcacctatactgaaacactagctgagatattttagatgacaacttgactagttgagtcctgcctttctgttggtgtctaaatcctgcttactctaggtggtataaaccagtcctgccccgtgccaactgctaatgcttcccatgacatctgttgatggtcagcattgtgagtgtaataatacccattggtgtggattaaaatatatggcagataaggtgcaaggtagctgccaataaaggtgtgagcagacagcctctgtgcaaagctcctaggtgccccatcagcacagagtgtacgtgcttttaaggtatttacctcctgcctgatttatttgttagaaccatttgtttttcccatactgctttgccttccgcccgtcgaatgctctgtggaaaccccagtttctacactcatagcagtctagcctaacatttattttagacaaagtgctgtaaacgtcaatttcaccaaacaaaagtcagtagtgggagagagaagagccacctcttcaaggactaacttgtaaatagctgatcatcagggctttcttctcccaagcacaattccagctgcgtgtgacttcttattgttaatggcagttttgtgtctgtggcagcaagataatggaccactattaaagttgattctcttcggtgctaggaaactgatatgcaagttcccagacagccacgaggacagcatatgcctctcagagccacgggcgtattctgaggtagatgctgggagcataggcctcatttcagggctttgaatgtactacaccagagacataagcttcctctctgatcagaacctacagaaccaaggcgtaaaccggtgttttcacaatataccacatgggcttaagatcagggtgctccagtcggaaggtgataaccttcaacaaacatgttgggttaaaaccaaattaggggtcgggtcaaaaataaattcagttaaccaggaatagaggggcacatttctgattactttttcaaaatcctggcctgtgattatttttattatgctacacagcttgcattgtgtgctcactttctcagtcatttccagggacagcatccaatatggtaggaactgaaaagcagtgaagtggagatgcattttctagcagtggcagagtgctgggcacacagtaggtaatcacacacacacacacacacacactcacacacacacacatacaccatcttctactccctgcttttcacccccatttgatccctctcagtgggaaatgtagccttgttttggcgtcatattaacaaaaagggatgcttttaaaaagttaaatggaaaaaaaggagacttggttagggtcgatttaacttttttctatgctagagtaaaagaagccaaagtttgcaaagtatagctaggcccccaaaactagatgtttatagcagcactgcagacaacaaaaattattcataccagcttaggaatttggtatatgtgatgcatgctaaaaaatttttttttaatatatactagcatttgtctttaaatagtattattcctttcaaccaaagactccagaattatttttcaaaagcaaaaaaaaaaaaaaaaaaaaaaaaaaaaaaaaaaaaaaaaaaaa

SEQ ID NO: 1013 - DNA, 2807 bp, Rattus norvegicus
ccgcgttaaagccggacggagtacttctattgctggcagacctgccccggagcgcgtaaacccgcacgctcgcgccgcccacgtccagctcgcgaatccggaggcgtccggttccaataatgccccggaaggcagctagtccagaggaggcagaaaggatgccgggctctgaagagatagaggctgggcggccgcggccggttttacgctctgtgaactcgcgcgaaccctctcaggtcatcttctgcaaccgcagcccgcgcgtcgtgctgcctttgtggctcaactttgatggtgagcctcagccctacccgaccttaccaccgggcaccggccgccgcatccacagctaccgaggtcacctttggctcttcagggatgcggggacccatgatggacttctggttaaccaaacggaactgtttgtgccatccctcaatgttgatggacagcctatttttgccaacatcacattgccagtgtataccctgaaagagcggtgccttcaggttgtacggagcctggtcaagcctgagaactacaggaggctggacatcgtcaggtcgctctatgaagacttggaagaccacccaaatgtgcggaaagacatacagcggctgacccaagagcacctcgagaatcaggccctgggagaggagcctgaaggagtccactgagattacttggtcctgaatttcggccttgatggtctgaaatcgatctacacataggacaggtcactttctttcggttttaaaatggttcattcttggagtaaaatatccatcatgtaaaagaaagttaactaacatcactgagctttgtagtgtttaagactaaacctgcaaagtgccaccgagtctgccctttctagagcattcatcagaagaagctgttttcagttttgcttcctagtaaggctggatgttcagcataaggatgttagtgtgagcgattcgcgaggagttgctctgtgtcctctaatctgaagaatacagcctcgtatgaacagagccccaccgctcacttggggaaggctgagaaggccctaatgctgggatggacatcctgtagaggcccagtgcctaatgtgtgtggagtcttcagtcagtgttggaggaacaaaccattgggtacttagtgggagagttggagggcctggctctctgtctgaggaaatcttaagtgtacacgtaaaggaacaacttagcagcttctgtttagaaagaactttctcttgagtttccatgtctcagcactttctttctactttgttagtttattttattttatttttgagacttgtgtagcccaggtcagcctcagtcactccggaggggatgctggtcttgaattccggatcctctgggagtgtgtcagcattgggagcacatgggtcgaccacagtctgctctgttcttgcttttcccattttgagacgggctcatactgtagccctgcctggcctcaagctagagtcagccctgtctccccacccagtctggctgcttagactgggtgggcttcccatattcactgccccagacagcagagacgagctgtccttgtgtttaggtctggttttgagagttccttctctgaggaagctgctggcaggagcagggtttctgttccttcccgtcagcccctagcattccagctgggcgccgcactctgctttggcaggcgctagttatgcttcgatgggagaggggagtgaagctccctcagccacacactccaaaccatgggtcccagagcagtctgcaatgagtagtagtttgtgggcagtcacagcttttcttacatattcaaatattgatgttcactacttctatcaaacattttgtagaacataattttttatttgtttttaattcctcagcagagaaaaatgagagaagcttgggcattgtgtgtggcacacaccagaaaggacagtcagctgagagggtgcagaaaggctcttgtgcgctggctctcagctgcatgtagtcctgtaacccagtgttctctctagtacacattttaattggttaaagcactttgtcctggccgagatcataaggtatatacagttttgtggcctgatttttcattgaacttcattgttttgttttcccctctttttcgtttttggttttgtttttggtttgttttttgctttttgttttatcaagatagagtttctctgtgtagcccaggctgtcctggaactccctttgtagaccaaacaactgattactggcctcaaacggagatctgtctgcctctgcctctccagtgctgggattgaagtatgcctaatcttcatctaacttagtaacttgtcttttccatgttactgcacacactgtctaaattccggtgtgctagcctctccctttgagggtgactgttgggagtatttgtctcagtcctgggctccttgagtgcagtctgatgctctaagatcagcaaaatcactgaacttaatactgacactcctgccgccctctcagcgtctctccttagtctgcagcattccgtgagtgaagcggcacaggccagtgtggagcctgtgtgtgggaagtcagcaggtgccgagctattgcaacattggttttattttttaagcctatctctgtctctaaaagatgtaatgtttgtcttatttaactggaagtttgaatactgttctctgtgccttaggacatgagtcacttgtccttgcacatcctgtaagtgtgttcctcagactttgtactctcctttgagttctctgaaaaagctgacctttagtacaataaacggtgctaagtgaagga

SEQ ID NO: 1014 - DNA, 2415 bp, Rattus norvegicus
ggcacgaggtaagtcacaccagggccatctttattctcttttacaatataaacatgctgctgtggggtgtgcgttctgtgtgccctcagaaggagcaggcagcgatccagcgtttcatccctagcgctccacaaatggttcttgagttctcacagcagtgaaaactctgaccttctctttacagggataaggaggaaggtctcgtgagtgacctcccctgatgatgatgtggagaggggagggaaggcagccccactcctccctgcagtggacctgctatgtctagctgctgcttctcctgaaaacatctgtccaggggcttcttgaccacagcagccattgagaaaactcatggccttctgtcaacgcctccctcgtgactcagcattgagatatattatctctacacagcggccagggcacttaaacttgttcaagaaaatcctaatatttagggaaagcattttaaacgcacgcccaccacgtccctgcccccctcgatgggcgcgggggcgtcccggccgccgcagccgccgcaggagcccggcagagccgttgtcgcggatcgctccgcagccgcgggccgcgttaagcccatccacagtaatggccacagccttacctaggaccctgggagagctgcagctgtatcgaatattgcagaaagctaatctgctttcttactttgatgcctttatccaacaaggtggtgatgatgtccagcaactgtgcgaagctggagaagaagaatttttggaaatcatggcactggtgggcatggcaagcaagccccttcatgttagacggcttcagaaggctttgagagattgggttacaaatcctggccttttcaaccagccattgacttcccttcctgtcagtagcatacccatctataaattaccagagggatcaccaacatggctgggaatatcctgcaatagttatgaaaggagtagcagtgcccgagagccacatttaaaggtccctaaatgcgctgccaccacctgtgttcagagcttgggtcagggcaagtcagaggtgggaagtctagcactgcagagtgtcagtgaatccagactctggcaaggacaccacaccactgaaagcgagcatagtctctccccagcagacctgggctccccagcctccccaaaggaaagcagtgaagccctggatgctgccgccgcgctctctgtggccgagtgtgtggagcggatggcccccacgctgcccaaaagtgacttgaatgaagtgaaagagctgctgaagaacaataagaagttggccaaaatgattggtcacatcttcgagatgagcgacgaggatccacacaaggaggaggagatcagaaagtacagcgccatctatgggcgatttgactccaaaagaaaggatggtaaacacctcacattgcatgagctcacggttaacgaggcagctgctcagctgtgtgtgaaggacaatgccctgctgacgagaagagatgagcttttcgccctggccaggcaggtttctcgagaagttacctacaaatacacttacaggaccaccaggttaaaatgtggtgaaagagatgaattgtctccaaagagaattaaaatggaggatggatttccggacttccaggaatctgtgccaacactcttccagcaggccagagccaaaagtgaagagcttgcaggtctcagttcacaggctgagaaggggatggcaaagcaaatggagctcctgtgtgcccaggccggctatgagaggctgcagcaggagaggagactcatggccgggctctacaggcagagctctggagagcagagccctgatggcggccttccttctgatggctccgatggacaaggagaaaggcctttgaatctccgaattcctagtgtgcagaacagacagccccatcattttgtggtggatggggagctcagtagactttactccaacgaggtgaagtcccactcatcagagagccttgggattctaaaagactatcctcactctgcattcaccttggaaaagaaagttattaaaacagagcccgaagactcaagatagctgagattctccccctgctctctggaaatgacaccagatccgaggatatgctccatcgtagattaagccttaataaccagtgttgcctcattcagctcccagaccatagccaaagcgtaagaactcacacagtcgtctgtgggcaccaggacaaagcaacagccacagaagagggaaccgagatagcactgcaaagtaacgggcaccgaccggttaccttcctgtgtaagttgcttgtgtggaaaggctcaataccgtaggcattcactatttaagaatgtacaatgtgtctgtaatttatagaagcaaatctaggtgttgataccttgcagtctaatagacgtggatccc

SEQ ID NO: 1015 - DNA, 2533 bp, Rattus norvegicus
ggagaggagaggagagggaaagccagccaagaacacatggagagaggggaggggatgtggaaagagggagaaggcgcagagagtaagagagcaagggcgtcaaacagcccctttaagagtaagccaggcatgcctggctaatgccaggtaactgtgggggcagagcctagaggggatgctaacagagctcatctcagtccactcttctcacccagtctgccccagtcaccctgtctttgtatccaccccttctgctaggaaacaccatcctcacacatccgtggagctcactgtctgtcatccttcggatgcaagtgtggctttcttcatccatattagttcccatcaaaactctccttctacctctctattttagttatcctgtggacagctactacacttctcttttttgtttttaaattacttatgtattattttaatacccactgaaatgcaagattttggagggcaagaaagcatagcaagtatctaaaggatgttcagtgaagggatgacttggtcaatcagtgtagctcattcagtaaggagcctcatagagcacccagtgcagtgatgaatgggtcactcgccatggcattctctagtgtgtaagtctcccatttttgtgaataactgtttgaaagattattttggcaatatctacctttcatcaccaaggtaaccacatctaatctctcttttgactggtcatttagccttattttctacctcaaaaacttgaaagatacaaggaataacaaaactttcctctaaggctctctgagagtatttaatgaacagcaggtaaaagcaagccaggctgtagaggtgacatgattgcctaggagctatgtagaggcatctttcatgtatacacgttaacaacacattcgaactacagttagctgactctgggacacccagaagaattgatgtcatgtttgtctgctttcatcctgtttgccttagggagccatggacatcgaagcatacttcgaaaggattggttacaagaactcagtgaataagttggacttggccacattaactgaagttcttcaacaccagatgcgagcagttccttttgagaatcttagtatgcactgtggagaagccatgtgtctgggcttagaggccacttttgaccacatagtaaggaaaaagcggggtgggtggtgtctccaggttaatcatctgctgtactgggctctgaccaaaatgggttttgaaaccacaatgttgggaggatatgtttacataactccagtcaacaaatatagcagtgaaatggtccaccttctagtacaagtgaccatcagtgacaggaactacattgtggattctgcctatggaagctcctaccagatgtgggagcctctggaattaacctcagggaaggatcagcctcaggtgcctgccatctttcgtttgacagaagagaatggaacctggtacttggaccaaatcagaagagagcaggatgttccaaaccaagagtttgttaactcggacctccttgaaaagagcaaatatcgaaaaatctattcctttactcttgagccccgcactattgaggattttgaatatgtaaatacctaccttcagacatcgccagcctctgtgtttgtaagcacatcgttctgttccttgcagacctcagaaggggtttgctgtttaattggttccacccttacaagtaggagattcagttataaggacaatgtagatctggttgagtttaagagtctgactgaggaagaaatagaagatgtactgaaaaccacatttggcatttctttggagaaaaagtttgtgcccaaacatggcgaactcgtttttactatttagggtaaattgttctccattattatctcagtcttaaacattctaaaaatatgcaaatacatatccataacagaaatcgcacagctcaatattgatcaactaatgacctgtatcttctatttcctacattttatacaaaacgaaacccagttgtcctgtcatttcaccaataaaaataccgccagttataatgaaataaacctgatcatggatgtaacgacaatcctctcaacattaatcaacaaaaattacttatcgaagaggtggcgatcttgggagccatattcatttacaaacctcccaacatcattttatggttgaactcagatgaaaaatgaatgaatatgaatgatcagagaacagcaggaagtaaagtcaggcagactaaatctgaggtccaaggtttacaagaaaccacctgtacaacttaggattagaataaagcaaagaagaatgaaccatcattacaggtccaggtaacttcccagtcctcaaaacagaactcacgccagtggacctgggctctgggattaggtgccaagacaatgacacggcttagaaggcttagaatttcttccagagataattttgcagacacagttctttttgtatctgattttttttaactatgagaatactggtattaagtgatttataccttatatataataatctttgtagcctataa

SEQ ID NO: 1016 - DNA, 3502 bp, Rattus norvegicus
gaaaagcacatcccttaatcagagcctgccattagcaggcccggggctgacgtgctttagggaggactcggaccaagcaggccattttcacctgcgtaataacaggcttgggagtagcgaacgagcgcaggcacagcgagcggcctctggagcaggggaggagcgcaggcggcagccgccccggggccccggaggaagaggagggggagaaggaggagccgaagcgcccagaacagcagcagcgtctcggcctgagttgcagaaaaagcagcgacggtggcgcggagactctgcagcctcctggagcccggagtcccggtaggcaagcagcaggcagcgtccgcgtccctagccaccgcacccgggccttgccaagctacagtcgcccagcctggggcatagccagtcatggccgcaccgccggatctgcaagatgagccactgtctccggctaaccccgggtcccagttgttcgggggccggggggagggggaagaagcgacgccgaagggggccagaccagcgcagcaggacggggagcccgcttgggggtccggcgctggagctggggtagtgtcgtcgcggggactgtgctccggccccgcccggtcgcctcccgtcgccatggaaactgcatccacaggtgtggcagctgttcctgatgccctcgatcactcttcctctccaacactaaaagatggggaaggggcatgttacacatccctgatttctgacatctgttatccacctcgagaggactctgcatactttactggaattcttcagaaagaaaatggtcacatcaccacttccgagagtcctgaggagctggggacccccggaccctctttaccagaagtgcctgggacggagccacatggcttattgagttctgattctggaatagagatgactcctgctgagtccactgaggtgaacaagatcctagctgaccccctagaccagatgaaagcagaggcctgtaaatatattgacataaccaggccacaggaggcaaaaggccaggaggagcaatcccctgggctagaagacaaagacttggactttaaagacaaggactctgaagtctccacaaaaccagaaggggtccatgcacctaaccagccatctcctgtggaggggaagctcatcaaggacaacttatttgaagaatctacctttgctccttacatagatgagctttctgatgagcaacacaggatgtctctggtcactgcccctgtcaagatcacactgacggaaatcggacctcctgtcatgactgccacacacgagacaatccccgagaagcaagacctgtgtctaaagccaagtcctgacacagttcccactgtgactgtctcagagcctgaagatgacagcccaggatctgtcactcctccatcttctggaacagaaccatctgctgcagagtcccaggggaaaggcagcgtctccgaggatgagttgattgctgccattaaagaagcaaaggggttatcatatgaaacaaccgagagtccaaggccagtgggccaggcggccgacagacccaaagtcaaggccaggtccgggctgcccacaatccccagctccctggaccaggaggccagcagtgcggagtccggagactcagaaattgaactggtgtcagaggaccccatggcctctgaggatgcgctaccctctggctatgtgagcttcggccacgtgtcgggcccgcctccctctcctgcctctccatctatccagtacagcatcctgcgggaggagcgggaggccgagctggacagcgagctcatcatcgagtcctgcgatgcctcctcggcctcagaggagagccccaagcgcgagcaggactcgcccccgatgaaaccgggcgtcctggatgccatccgcgaagagacaagctctcgggccaccgaagagcgagcgcccagccaccaaggccctgtggaacctgacccgatactcagcttcacccctgtcaccctccagtcccgcccagagccatcatcaggtgatggagccccggtcccagagccgcccaagtcacagcagcagaagcctgaagaggaagctgtgagttccagccaaagtcccgcggccaccgaaattcctggaccacttggttctgacctcgtgccccctctgcctttcttcaacaagcaaaaagctattgaccttctgtactggcgggacatcaagcagacggggattgtgttcgggagcttcctgctgctgctcttctccctgacccagttcagcgttgtgagcgtcgtcgcctacctggccctggctgccctctctgccaccatcagcttccgcatctacaagtccgttctacaagctgtgcagaaaacagatgagggtcaccctttcaaggcctacctggagctggagatcaccctgtcccaggagcagatccagaagtacacagactgcctgcagctatacgtgaacagcactctgaaggagctacggaggctcttcctggtccaggacctggtggattccttaaaatttgcagtcctcatgtggctcctgacctacgttggcgcactcttcaatggcctgaccctgctgcttatggctgtggtttcgatgtttactctacctgtggtatatgttaagcaccaggcacaggttgaccaatatctgggacttgtgaggactcacataaacaccgttgtggcaaagatccaggctaaaatccccggcgccaagaggcacgctgagtagatggttgccccaggagaagccggacatgaatgggggtgtctggagtggtaacagctctctccttcctcgttactgcgaattgattgtttcccttccccagtaccataatcttagaggcaaacttcgagacaggtgttttcaggcttttcctgtactcttaggatatttgagtccccccgccccttgtcaagcactaaagtatagagtgtgttagatgtggtttttaattttgtgttgctaaaaaaaaaagtgcatgatggtgagagctcacgttctccttcgtcccttgctgtcctccccctgcaatgcttctgtggcttctactgtccctgtggctaggcccttcttgccaagtgcgctgacacatagtgggtcgcttatcatgtccttgggttgctggttggattcatctctaataacactatatagaatcgtaggccaatgttttagcattttacccccccacacacagaacataaaaattaatataaaacagttgaccgtgtatatggtgatccgttttgtataactaagaatgatcgaattaaagaataaatccaaaaatgaacgcacagtacttttattgtatgggatgcctgggctgatttacatgtatggtaactaaagtgccagcatgttgactttattacgatttgtatttcttcctctgtagttcctaacggactcaatcacagactctgggtatttgcacttatgtacttgatactgaatgcatcaataaatgtgactcaatgtaaac

SEQ ID NO: 1017 - DNA, 1098 bp, Rattus norvegicus
gatagtgaattcgtgttgctttcaaggtcatgctggtgggggattccggtgtggggaagacgtgcctgctcgtgcgcttcaaggatggggccttcctggctggtaccttcatctccactgtgggcatcgacttccggaataaagttctggatgtggatggcatgaaggtgaagctgcagatctgggacacggctggtcaggagcggttccgaagtgtcacccatgcctactaccgggatgctcacgcactgttgctgctctacgacatcaccaacaaagattccttcgacaacatccaggcctggttgacagaaatccaggaatatgcccagcaggacgtggtgctcatgctgttggggaacaaggttgactctactcaagaacgagtggtaaagagggaagatggggagaaattagccaaggagtatgggctgccattcatggagaccagcgccaagagcggcctcaatgtggacttggcttttacagccatagcaaaggagctgaaacaaagatccaccaaggctcccagtgagccgcgcttcaggctgcatgactatgtgaagagggagggccgaggggtctcctgctgtcgactctgaacctagctgaatttcggttctacgctggaggcagctgtttgggataccataggtgatggatgccagaatgtcttccttttcaagacacctgaggctgatgctcttcagccccttggcctcaggggccatcacagaaagcatacaaaccacactatggcctgtggctgccctcttctgggcactcccagcaggaaggatggcaccacattcgtgcctcctatgaaaagccatgcttactgcacacggcctgggaaggaccccacacacgaccaaaggctacaagaatcatgttgtccatttgttgggttgcttccaagtcaactagtaggctctgatgtaggaaaccacaggaagattgggctgatagaaccaggtcactacttagcaggctggcccagtccttcccaccttgtactaaagtcaccagactacaaatgttgtgtgaaaacctgtccccattaataaaggtgtttctgcccgggaattcgcggtcacc

SEQ ID NO: 1018 - DNA, 984 bp, Rattus norvegicus
atgtaccaggattatcccgggaactttgacacctcgtcccggggcagcagtggctctcctgcgcacgccgagtcctactccagcggtggcggcggccagcagaagttccgggtagatatgcctggctcaggcagtgccttcatccccacaatcaacgccatcaccaccaccagccaggacctgcagtggatggtacagcccacagtgattacctccatgtccaacccctatccgcgctcgcacccctacagccccctgccaggcttgcgatcagtccctgggcacatggctctccccagaccaggagtgatcaagaccattggtaccaccgtgggccgcagaaggagagatgagcagctgtctcccgaagaggaggagaagcgtcgaatccggcgagagagaaacaagctggccgctgccaagtgtcggaaccgtcgacgtgagctgacggagaagctgcagacggagacagaggagctggaggaggagaagtccggtctgcagaaagaaatcgctgagctgcagaaggagaaggagaagctggagttcatgctggtggctcacggccctgtgtgcaaaatcagtcctgaggaacgccgatcttcccccacctccggggtacagtccttacgcggtacgggcagtgctgtcggccctgtggtggtgaaacaggagcctcctgaagaggacagcccctcttcctcagcagggatggacaagacccagcgctctgtcatcaagcccattagcattgctgggggtggtttctacggggaagagcctctgcacacccccatcgtggtgacctccacacctgccatcactccgggcacttcaaaccttgtcttcacctaccccagtgtcctggagcaggagtcgcctgcgtcgccctccgagtcctgttccaaggctcaccgcagaagcagtagcagtggggaccagtcatcagactccttgaactcccccactctgctggctctgtaa

SEQ ID NO: 1019 - DNA, 2310 bp, Rattus norvegicus
tagaatcgaaccgcggaaagtccatcgtccctatcgaccaacagctacgtaaacaactatggcgggagagaggtggcgggccgaggggctgggagaaggatgggccatctacgtcacacccagagcccccatccgggagggaaggcggaggctcgccactcaaaatggcgacgggagtgacgcgcctgcgtacgaaactcatccgtcgcgccacggacgacgggaagtgaggttttcagaagagccgccagaagtgtacggcgacttcgagccccgggcggccaaagaaaggtctccgggggaaagacgaaccccgccagaaaagttccggtcggattctgcgaaagaggaagtgagagaaagcgcttacaatcttcggtctcgacaacggaggcagcggggaccccaggaagccgaggagatgaagacgcggaggtctactcgtctggagcagcactcacagcaggcgcagcagcagctgtcaccggctacgagcgggcgaggattacgggacgctcagtccttaagtgaggaccgcggagaggatgaaccttcttcccaacctgttacaagccaaacagtctcaaagaaaactgtcaggacaccagagacttcagtgatgagtgaagatcctatcagtaacttatgcagacccccattaagaagcccaagacctgacgcttccattgtccaacacatcaacccctttgaggaagatgaagccgcagtagcagccggtcaccatccagactcactgtgggggttaccacacagtcggggggacttcacagctcatgagaatcaaccctcactgctgcccacaggatgtcaaaaaaaccctcaagagtgggttgaacaagctgtgagaatgaggactagaatggcatataacaacattcagaaatcagactttggaaaccaatctccatcaacctccaggcaacaagcagctgtacaacccccagatgagtcttctgtcaagataaaatggtggctgctgatacttgttgctgctctggccatgggaatatattggttctttcatactcctgtagtagaaatcactgcagctcaggatgctgcggaagtgctcaagtgtctgagtgaacagatcgccgatgcctactcttccttccgcagtgtccgtgccatccggatcgacggagcaggcaaagctgctcaagacagtgacctcgttaagcacgaagtcgatcaggaactgacagatggatttagaaatggccagaatgcagctgtggtccaccgcttcgaatccctgcctgcaggctcaaccttgatcttctataaatactgtgaccatgaaaacgcagccttcaaagatgtggccctcgtcttgacggtactgttggaggagcagacgctggaagccagtctaggcctaaaggaaattgaggagaaagtgagggatttccttaaagtcaagttcaccagctctgacacggccaactcctacaaccacatggacccagacaagctcaatggactctggagccgcatctcccacctcgtgctgcccgtgcagcctgagaatgctctgaaagcaggcagctgcttatgagggaaagaagcggaaatcctgtctcgagtttgaaccattttcagactttgtaaccagagacggattttggagcagtttttgaaaactggtttctttttaaaggaagtaaagttcatacataaaggtggaataactaaatcatttatgcagcctacttctctgtgatttgggagaatcgtttttctatttccacctagaaccatgttaaagatatttagcatagtgcacagtatatgcagtccccgagtgtctgctaccttgattctggccgaatcattcttgctgtgtgaccagcgagaagggctaggttcctctctcaagcaatcagctttctattgaattttggatttgtgtttgtgaccttattaatgtctgacaaccccctaattgtagctatggatttccctgttacttcttctctcataccattgaaatgtgtggtccttagtttctacctataaaaataaaactgggtgtgcagtttagccagcccctcccccactggtttgtagagagggagacaagggtgtgggaggtagaaagagaagagaaattgtttaatagggaagggaaggaaggaaggtaaaaagatgttgcaagctgggcatggtaagccagcctgttatcccagtattgtcccagtagtcaggaggagcagaggttcaaggtcagcctcatctatagagtgagttttctgccacctggactacatgagacactgtcttaaaaac

SEQ ID NO: 1020 - DNA, 1188 bp, Rattus norvegicus
atgcaagctgataggagcatgaagatggggcatgtctcaaaccccctcagcacctctgccccagttgatgccaccgctgggcccaatctcattccagacctcattaccaagatcccctggcctcgctggatactctttattgccatccttgctgctggagtcctcttagtctcctgtctgctctgtgtcatctgttactgttgccaccgccaacgccacaggaagcaacccaaggataaagagactgtgggcctgggcagtgctcggaacagcaccactactcacctggttcaaccagatgtggagtgcctagagccctgctctggaggggaccaaccgtgggggcaactgctgctctccctggagtatgattttggaagccaggagattagagtgggcctgaggcaggctaaaaatctgaaggctgagggcacagcagacccctacgcccgtgtcagtgtttccacccaggccgggagaagacatgagacaaaagtgcaccgtgggacactctgtcccatgtttgaagagacatgctgcttcctggtcccaccagcagagctgcccaaagccactctgaaggtgcagctattggacttcaagcggttttcagaacatgagccactgggggagctccagctacccctgggcactgtggaccttcagcatgtcctggagagctggtaccagctaggccctccaggttccactgagtctgagcagatgggggagctgtgcttctcactacgctatgtgcccagctcaggccgcctgactgtggtcatactggaggctcggggcctgaatccggggcttgcagaggcctatgtgaaggtccagcttatattaaaccagagaaagtggaagaagaacaaaacatcctccaagaagggcacaactaacccctacttcaacgaggccttcgtcttcctggttcccgttagccagctccagagcgtggacctggtgctggctgtctgggcccggggcctgcagctcctggctgagcctgtgggcaaagtgttgctgggtccccgggcttcaggccaacccctacagcactgggcagacatgctggcccatgctcggcggcccatcgcccagtggcaccacctgcggtcacccagggaagtggatcgtgctctggccctgcagcctcgtcttcccctgcttaggcctcgctcctga

SEQ ID NO: 1021 - DNA, 3770 bp, Rattus norvegicus
tgaggccggcgatggactccccaagtgcaggatacacctttgagtaccttattgaaacattaaatggcagttcacagaagaagttcttcaatgtacctaaacttggaggcaccaagtatgatattctgccttactcaatacgggtcctattggaagctgctgtacgaaattgtgatggatttttaatgaaaaaggaagatgttataaatattttggactggaaaaccaaacaaagcaatgttgaagtgccctttttccccgcccgtgttgttcttcaagatttcactggaataccggcaatggtggattttgctgctatgagggaggcaatgaaaactcttggaggtgatcctaagaaagtccaccctgcctgtccaacagatctcacagttgaccactctttacagattgacttcagtaaatgtgcaatacagaatgcaccaaatcctggaggtggtgacctacagaaagcaggaaagctctctccacttaaagtacagcctaagaagcttccatgtcgaggccagactacctgccggggatcgtgtgattctggagaactaagccgaaactcaggaacattttcttcgcagattgagaatacgcctgtcctgtgtccctttcatttgcaaccagtgcctgaacctgagacggtgttaaaaaatcaagaagtagaatttggcagaaatcgagagaggcttcaatttttcaagtggagctcaggagcttttaagaatgtggcagtcatccctcctggaactggaatggctcatcaagtgaacttagaacatttgtcgagagtagtgtttgaagaagccgacctgctcttcccagacagcgtaattggcacagattctcatataaccatggtgaatggattgggaattcttgggtggggagttggaggcattgagacagaggcagttatgcttggcctgccagttactcttactttaccagaggtggttggatgtgagctaactgggtcatccaatgcttttgttacatccatagatattgtcctaggcattacaaagcacctcaggcaagtaggcgtggctggaaagtttgttgagttctttggaagtggagtttcacaattatctattgtcgatagaactactatagcaaacatgtgtcccgagtatggtgctatcctcagctttttccctgttgacaatgtgacactacgacatttagaacatacaggttttgacaaaaccaaacttgagtcaatggaagaataccttaaagctgtgaaattgtttcgaaatgatgagaattcttcagaacctgaatattctcaggtgatacagattaatctgaattcaatagttgcatctgtcagtggtccaaaaaggcctcaggatagagttgctgtaacagatatgaaaagtgattttcaggcttgcttaaatgaaaaggttggatttaaaggcttccaagttgcagcagaaaaacaaagtgatactgtctcagttcgttatgatggaagtgagtataagctgtcccatgggtccgtggtcattgctgcggttatcagctgtaccaataactgcaatccatcagtgatgctcgctgcaggtcttttggctaaaaaggctgttgaaactggtctacgagttaaaccttatataagaacaagtttgtctccaggcagtgggatggttacacattacctcagttcaagtggagtgttaccctaccttagcaagctagggtttgaaatagttggctatggatgttcaacgtgtgtaggaaatacagcacctttatcagaagcaattttgaatgcagtaaaacagggtgatttggctacctgtggagttttatctggaaacaaaaatttcgaaggtcgtctttgtgattgtgtccgtgctaattatctcgcctctccacccttagtggtggcttacgccatagcaggcacagtgaatatagatttccagacagagccattaggtactgactctacaggcaagaacatttacctgcatgacatttggcctagtcgagaagaagttcatcagatagaagaagaacatgttattttgtccatgtttaaagcactgaaagagaaagtagagatgggaaataaacggtggaattccttagacgctccagattcagtgttgtttccatgggatgttaagtctacttacatcagatgcccttcattttttgataaacttaccaaagaaccagctgcatcccagcctattgaaaatgcccatgtcctgttgtacttgggagactctgtcactacagaccacatatcacctgctggaagcattgctaggagcagagctgctgctaagtacttgacaaacagaggccttactccccgagagttcaactcttatggagctcgaagaggtaatgatgctgtgatgacaagaggcacgtttgcaaacatcaagctttttaataagtttattgggaagccagctcccaaaacaattcattttccatcaggacagacgctcgatgtatttgaagctgcagaattataccaaaaagaaggtatcccactgataattttagcaggaaaaaaatatggttcaggaaattcaagagactgggctgcgaaaggaccctatttgctgggtgtaaaggctgttttggctgaaagctatgaaaagatacacaaagatcatttgattggaattggtatagcaccacttgagttcctcccaggagaaaatgcagattccttgggcctctccggcagagaagtattttctttatcatttcctgaagaactctttcctggaattacgttaaatataaagacgagcactggcaaagagttcagcgtgattgcagcatttgaaaatgatgtggagataactttgtacaaacatggaggattgttaaactttgtggctcgaaaattcttatagtatctactccccatggtatctttcatggctggtaactgcaaagccttcttctgtgctggacccaggaatcattgccatggaactgcagatgatttcagtatacttctctcctccatggatgtaaatgataacgaatcaacgtagtgactaaaatgaaatcttgattttaaataatatacgaatggtgctattaacattgctaaaatcaacgtgtgaaggtgtgttgtggaagagacctgtaagtatggggggtatattttatgagaacattttgtaaataaagacagaatttgaacttgtgttgaagattcatatgaatagccgttctaaagctgtttgttttgttttgcaccttaaaactggactactgtttgttggtttaagaatagcaagttgatttagaagaagccagactagatcctaaaattatggaaatgggtacctgatttagaaatgaatttttaaatgtttttctttccagaattgaattggacacaattggcatttccagtttgtaatgtaagtcaggtttggccttagtctcaatacatctgcaaggcatagaacctgccccagatcacagtccctctgaccagccaaaatgtcctccatgtctgcagataaatgactgtaaaatacagctgattgtgtggtaccgtgtattagtaagaatatatttcctgtggtatagccctgtaattttttcagtaacttgccactatgacccactcacaagcccaaatacggtgtattaatttggactagattttgctcattttacatgactgtaactcctgtaacctcaattaggaatcactagctgacattccacactccttttatgactgctggaaacaattgagtcaa

SEQ ID NO: 1022 - DNA, 2118 bp, Rattus norvegicus
gggaagatggcgcccttggggctgaaggcggtggtggtggaaaaaattctaagtggagtcatccggagcgttaagaaggatggcgagtggaaggtactcatcatggatcatccgagcatgcgaatcttgtcatcctgttgtaaaatgtcagatatcttggcggagggcatcaccattgtggaagacatcaacaaacggagagaacccattcccagcttggaggcaatttatttgctgagtcccacagagaagtcggttcaggctctgattgcggacttccaggggacaccaaccttcacctacaaagcagcccatatcttcttcacggacacgtgccccgagcccttgttcagtgaactgggccgctctcgcctggcgaaggtggtgaagacactgaaagagatccacctcgccttcctcccctatgaggcccaggtgttctctctggatgccccgcacagcacctacaacctttattgcccatttcgggcaggggagcgggggcggcagctcgatgtgctggcccagcagatagccacactgtgtgccactcttcaggaatacccatccattcgctaccgcaagggcccagaagacacagcccagctggcccatgctgtcctggccaagctgaacgccttcaaggcagacactcccagtctgggcgagggcccagagaaaacacgctcacagttgctcataatggaccgggcagcagaccccgtgtccccgctattacatgaactcacattccaagccatggcctatgatcttctgcacatcgagcaggacacatacaggtatgagaccacaggactgagcgagtcccgggagaaggctgtgctcctggatgaagacgatgacctgtgggtggaactccggcacatgcacatagcggatgtgtccaagaaggtcacggagctcctgaagacattctgtgagagcaagcggctgaccacagacaaggccaacatcaaagacctgtcccacatcctgaaaaagatgccacagtatcagaaggagttgaacaagtactccacgcacctgcacttggcagatgactgcatgaagcacttcaagggctcggtggagaagctgtgcggtgtggagcaggacctggccatgggctctgatgcagagggtgagaagatcaaggacaccatgaaactgattgtcccggtgctgttggatgcctccgtgccaccctatgacaagatccgggttctgctgctctacatccttctgcggaacggtgtgagtgaggaaaatctggccaagctgatccagcatgctaatgtgcagtcctacagcaacctcatccggaacctggagcagctggggggcactgtcaccaactctgcgggctcagggacctctagccggctggagcggagagaacgcatggagcccacctaccagctgtctcgctggtccccagtcatcaaggacgtgatggaggatgtggtggaggaccggctagaccgaaagctgtggcccttcgtgtctgaccctgcccctgtgtctagctcccaagcagctgtcagcagtgctcgctttggccactggcataaaaacaaagctggtatagaggctcgggctggacccaggctcatcgtgtacattgtgggtggtgtcgccatgtctgaaatgagggctgcttatgaggtgaccagagccactgaaggcaagtgggaggtacttataggctcttcccacatcctcactccaacccgcttcctcgatgacctcaggaccctggatcagaagctggaggacatagccctgccctgactcagctgcttgctctgccctctcctcctgttccagagaaataaactcttcccttcatctttccatcagggctcacctcactttcttcccagagagagctgtataaaccagacccatgctgccggcctccccttatgttactgttctgcctgaaccttcccttggcccccagaagcagctttagcttccatgaacgttgggaacctgggctctggctctctggctgggtccctccatccaaaccctgatcttagcagacaaactgcagaggagacagagagctgccaatcagggaatggcagggctgcaaccccattgtcactagaa

SEQ ID NO: 1023 - DNA, 1442 bp, Rattus norvegicus
gtcccccccaccccagctgaataggctgcgttctcttggaacgcgccgcagaacgaggttctgtgaccctagccgcgttccctccttagttcctttcgcctacccacccgcgtacccgacagacccaccccgtcctgtgccaggaaagcgctgccaccggcaccatgccccacccatacccagcactgaccccggagcagaagaaggagctggctgacatcgctcaccgaattgtagctccgggcaagggcatcctggctgcagacgagtccactggaagcattgccaagcgcctgcagtccattggcaccgagaacaccgaggagaacaggcgcttctaccgccaactgctgctgactgccgatgaccgtgtgaatccctgcattggaggggtgatccttttccacgagacactgtaccagaaggcagatgatggccgtcccttcccccaagttatcaagtccaagggtggtgttgtgggcattaaggtagataagggtgtagtgcccctggctggaaccaatggcgagaccactactcaagggctggacgggctgtctgagcgctgtgcccagtataagaaggatggagccgactttgccaagtggcgctgtgtgctaaagattggggagcatactccctcgtccctcgccatcatggaaaatgccaatgttctggcccgttacgctagcatctgccagcagaatggcattgtacccattgtggagcctgaaattctccctgatggggaccatgacttgaagcgctgccagtatgtaactgagaaggtactggcagctgtctacaaggctctgagtgaccaccatgtctatctggaaggcacactgctgaagcccaacatggtcacccctggccatgcttgcacccagaaattttccaatgaggaaattgccatggcaaccgtcacagcacttcgtcgaacagtgccccctgccgtccctggggtcactttcctgtctggagggcagagtgaggaagaggcatccatcaacctcaatgctatcaacaagtgtcccctgctgaagccatgggccttgactttctcctatggccgagccctgcaggcctctgctctaaaggcttggggtgggaagaaggagaacctgaaggcagcccaggaggagtacatcaagcgagccctggccaacagcctcgcttgtcaaggaaagtacactccaagtggccagtctggagccgcagccagtgaatctctcttcatctctaaccatgcctactaaccagagctgatctaaggctgctccatcgacactccaggcccctgcctacccacttgctattgaagaggggccttcaggctctttcccatcactcttgctgccctcgtgtgtgcagtgttgtctgtgaatgctaaatctgccatcccttccagcccactgccaataaacagctatttaaggggg

SEQ ID NO: 1024 - DNA, 1996 bp, Rattus norvegicus
ggaatcccctctgagaacagtttccagtcctcgtcctcgtccgttccgtcttctccaaacagctccaactgtgatgccaacggcaaccccaagaacacggatgtctctagcattgacggtgttctcaagagcgaccgcacagactgtcctgtgaaaacaggcaaacctggtgcccctggcatgaccaagagtcacagcggaatgacaaaatttagtggcatggttctgctatgtaaagtctgtggggatgtggcctcaggattccactatggagttcatgcttgtgaaggctgtaagggcttcttcaggaggagcattcagcagaacatccagtacaagaagtgcctgaagaacgagaattgctccatcatgaggatgaacaggaaccgctgccagcagtgccgcttcaagaagtgtctgtccgtgggaatgtcgcgggaccgtgttcgatttggccggattcccaagcgtgaaaaacagagaatgctaattgagatgcaaagtgcaatgaagaccatgatgagcacccagttcggtggccacctgcagagtgacaccttagcagagccgcatgagcagtcagtaccaccggctcaggagcagctgcgcccaagccccagctggagcaagaaaacatcaaaagcacccctcctccttctgattttgcaaaggaggaaggtgattggcatggtgaccagagcccacaaggatacctttctgtataatcaggaacatcgagaaaactcatctgagagcatgccaccccatagaggagaacggattcccaggaatgtggagcaatataatttaaatcatgaccatcgtggcggtgggcttcacagccacttcccctgtagtgagagccagcagcatctcagtggacagtacaaagggaggaacatgatgcactacccaaacgggcataccgtttgtatttcgaatggacactgtgtgaacttctccagtgcttaccctcaaagagtctgtgataggattccagtaggtggatgttctcagactgagagcaggaatagctacctgtgcagcactggagggaggatgcatctggtttgtcctatgagcaagtctccatatgtggatcctcagaaatctggacatgaaatctgggaagaattttcaatgagttttaccccagcagtaaaagaggtggtagaatttgcaaaatgtattcctggcttccgagatctgtctcagcatgatcaggtcaacctgttaaaagctgggacttttgaggttttaatggtgcgatttgcttcgttatttgatgcaaaggagcggactgtcaccttcctgagtggtaagaagtacagtgtggatgacctgcactccatgggagcaggcgatctgctcagctctatgtttgagttcagcgagaagctgaatggcctccagctcagcgacgaggaaatgagcttgttcacagctgttgttctggtgtctgcagatcgatctggaattgaaaatgtcaactcagtggaggctctgcaggaaacactcatccgtgggcgcggaaggaccttaataatgaaaaaccatccaaatgaggcctccatttttacaaaattacttctaaagttgccagatcttcgatctttaaacaacatgcactctgaggaactcttggcctttaaagttcatccttaaggcctttgaagatcaatcgatgctaatgtacattttatgctgagatgtttatttatatgtgtataccatattgtgaaaatagaaaaggactagcgccaggtcctggacagtctgtagtcagtcaccagtagctgttcaaatgagaactcattgtcttgttaaacattggcccaccctccctgtaaaccaaccagctgtgttgcactagactggagaagttacactgaattataatcacactgaatgttagactttttcatctgccaaagccaaaataccatttgatctccccgtggtataaatctagacgcacattgcagatataggaggg

SEQ ID NO: 1025 - DNA, 428 bp, Rattus norvegicus
caccctaacctaaaccttttgaattttgaattaatgggtaccctatagaaaaaatgacctgcggaaaaccaaacagtgaagggaaagaaggaaagaattccaattgacacaatttaaataaaatatggcttttcaaataaaggaagagaagtttcttttgggcacacaatctaaacaatatttatgtataattcagctcttatttggcttaaatgggcttagtgggaaatgttatcatttttactattttctacagagaaaatattttccagtttatcaagtaactctggactttggaattacctgtttttatgttccagctgtctatatagttgtttctctgaaattgtacataaaatgtttttacattaaaatgaattactgtataaagtactgcattatgcataataaagatactaatgctttat

SEQ ID NO: 1026 - DNA, 755 bp, Rattus norvegicus
agaggcagcgagtaccagtcccttctctgctctgctgacaagcgcaccctctgttacctgctcagcaccatgaaggtctccaccgctgcccttgctgttcttctctgcaccatggcgctctggaacgaagtcttctcagcgccatatggagctgacaccccgactgcctgctgcttctcctatggacggcaaattccacgaaaattcattgctgactattttgagaccagcagcctttgctcccagccgggtgtcattttcctgaccaagagaaaccggcagatctgcgctgaccccaaagagacctgggtccaagaatacatcactgagctggaactaaatgcctgagattagaggcagcaaggaacccccaaacctccgtgggccccgtgtagagcaggggcttgagccccagaacattcctgccacctgcaaatctccccctcctataagctgtttgctgccaagtagccacatccagggactcttcacttgaatttttatttaatttaatcctattgatttaatactatttaattttttaatttattttattgtcacatttgtgtttgtagctatttattctgaaagacctcagggcacattcctcagccctccccccccctcccagttgctcacactgtgtttggtgacaattattctaggtagacgtgatgacaaagtcatgaactgacaaatgtacaatggatgctttgtctataccagagaaataataaatatgctctttaacaaga

SEQ ID NO: 1027 - DNA, 5236 bp, Rattus norvegicus
cgggccggcgggagtagaagagccactgagccatgggcgcaggcagttccaccgagcagcggagccccgagcagccggcggggagcgacacgccgagcgagctggtgctcagtggccatgggcccgcagctgaagcctcgggagcagctggagaccccgccgacgcggaccccgccaccaagctcccacagaagaatggccagctgtcttctgtcaacggcgtagctgaacaaggagatgtccatgtccaagaggaaaaccaggaggggcaggaggaagaagtcgttgatgaggatgttggacagcgagagtcagaagatgtgagagaaaaagaccgagttgaagaaatggcggccaactccacagctgttgaagatatcacaaaggatgggcaggaggagacatcagaaataattgaacagatccctgcttcagaaaacaatgtggaagaaatggtacagcctgctgagtcccaggctaatgatgttggcttcaagaaagtatttaaatttgttggttttaaattcacggtgaagaaggataaaaatgaaaagtcagatactgtccaactactcactgtcaagaaggatgaaggcgaaggggcagaagcctctgtcggagctggagaccaccaggagcccagtgtggagactgccgtcggagagtcagcatccaaagaaagtgagctgaagcaatccacagagaagcaagaaggcaccctgaagcaagaacagagcagcacagaaatcccccttcaagccgaatctgatcaagcggctgaggaagaagccaaagatgaaggagaagaaaaacaagagaaagagcccaccaagtccccagaatccccgagcagcccagtcaacagtgagacaacatcttccttcaagaagttcttcactcacggttgggccggctggcgcaagaagaccagcttcaagaaatcaaaagaggatgatctggaaactgccgagaagagaaaggagcaagaggcagaaaaagtagacgaggaagaaaaggaaaagacagagccagcctcggaggagcaggagccggcagaagacacagaccaggccaggttgtcagcagactacgagaaggtggagctgcctttggaagaccaggttggtgacctggaggcatcgtcagaggagaagtgtgctcctttggcaacggaagtgtttgatgagaagatggaagcccaccaagaagttgttgcagaggtccacgtgagcaccgtggagaagacagaggaggagcagggaggaggaggagaggctgaagggggcgtggtggtagaaggaacaggagaatccttgccccctgagaaactggctgagccccaggaggtcccccaggaagctgagcctgctgaggagctgatgaagagcagagagatgtgtgtctctggaggagaccacactcaactgacagacctaagtcctgaagagaagacgctgcccaaacacccagaaggcattgtcagtgaggtggagatgctgtcctctcaggaaagaatcaaggtacagggaagtcccttgaagaaactcttcagtagctcaggcttaaagaagctgtctgggaagaagcagaaggggaaacgaggaggtgggggagacgaagagcctggagaataccaacacattcacaccgaatccccagagagtgctgatgagcagaagggagagagctctgcgtcgtcccccgaggagcctgaggagaccacgtgtctggagaaagggccgctggaagcaccccaggatggggaagctgaggaaggaactacttccgatggagagaagaagagagaagggatcactccctgggcatccttcaaaaagatggtgacacccaagaaacgggtccgaagaccttctgagagtgacaaggaggaagagctggagaaggtcaagagcgccaccttgtcctccactgatagcacagtgtcagaaatgcaagatgaagtcaaaactgttggtgaggaacaaaagccagaggaaccaaagcgtagggtggatacttcagtgtcttgggaagcactgatttgtgtcggatcatccaagaagagagcaaggaaggcatcctcttcagatgatgaaggagggccaaggacactgggaggggacagtcacagagcagaggaggccagcaaagacaaagaagccggaacagacgctgttcctgccagcacccaggagcaggaccaagcgcaaggaagttcctcacccgagccagcgggaagcccttccgaaggggaaggtgtctccacttgggagtcatttaaaagattagtcactccaagaaaaaaatccaagtcaaaactggaagagaaagccgaagactctagtgtagagcagttgtccactgagatcgaaccgagtagagaagaatcttgggtttccattaagaaattcatccccggacggcggaagaaaagggcagatgggaagcaagaacaagccactgtggaagactcagggccagtggagataaatgaggacgaccctgatgtcccagccgtcgtgcctctgtctgagtatgatgcagtggagagggagaagatggaagcccaggggaatgcggagctgccccagctgctgggggctgtgtacgtgtccgaggagctcagtaagactctggtccacactgtgagtgtcgcagtcattgatgggaccagggcagtcaccagtgtcgaagagcggtctccttcgtggatatccgcttccgtaacagaacctcttgaacacacagcgggagaagccatgccacctgttgaagaggtcactgaaaaagacatcattgcagaagaaactcctgtgctcacccagacgttaccagagggtaaagatgcccatgacgacatggtcaccagtgaagtggatttcacctcagaagctgtgacagccacagagacctcagaggctctccgtactgaagaagttaccgaagcatcgggggccgaagagaccacagacatggtgtccgcagtttcccagctgactgactccccagacaccacagaggaagccaccccagttcaggaggtagagagtggtgtgctagatacagaagaagaggagcgccagacgcaggccatcctccaagccgttgcagacaaggtgaaagaggagtcccaggtgcctgcaacccagactgtgcagagaacggggtcaaaagcactggagaaggttgaggaggtagaggaggactccgaagtgctggcttcggagaaagagaaggacgttatgccgaaaggacccgtgcaggaagctggagctgagcatcttgcacagggctctgagactggacaggctactccagagagccttgaagttcctgaagtcacggcagatgtagaccatgtcgccacgtgccaggttatcaagctccagcagctgatggaacaggccgtggcccctgagtcatccgaaaccttgacagacagtgagacaaatggaagcactcccttagcagattcagacactgcagatgggacacagcaagatgaaaccattgacagccaggacagtaaagccactgcagctgtcaggcagtcacaggtcacagaagaagaggcggctactgctcagaaagaggagccttcgacactacctaataatgttccagcccaggaagaacatggggaagaaccaggaagagatgttcttgaacctacacagcaagagcttactgctgcagccgtgcccgttctggcaaagactgaggtgggtcaagagggtgaggttgactggttggatggagaaaaagtcaaagaagaacaggaggtgtttgtacactctggacccaacagtcaaaaggctgctgatgtgacatatgacagtgaagtgatgggagtggccgggtgtcaggaaaaggagagtactgaagtgcagagtcttagcctggaggagggagagatggaaactgacgttgaaaaggagaaaagggagacaaagccagagcaagtgagtgaagaaggtgagcaggaaacagccgctcctgagcatgaaggaacctacgggaagccagtcctgacacttgacatgcccagctcagagagggggaaggcactgggaagccttggaggaagcccttctctcccagaccaagacaaagcaggttgcatagaggttcaagttcaaagcctggacacaacagtcactcaaacagcagaagctgtggaaaaggtcatagaaacggttgtgatttcagagacaggtgaaagtccagagtgtgtaggtgcacacttattaccagctgagaagtcctctgcaacgggtggccactggactcttcagcatgcagaggacacggtacccctggggcctgagtctcaggcagaatccatcccaatcatagtaactcctgctcctgaaagcaccctacatcctgacctacaaggagaaataagcgcatcccagagagagcgatcagaggaagaggacaagccagatgctggtcctgatgctgacggcaaggagagtacagcaatcgaaaaagtcctcaaggctgaacctgagatcctggaacttgagagtaagagcaacaagattgtgctgaacgtcattcagacagccgttgaccagttcgcacgtacagaaacagcccccgaaactcatgcttatgattcacagacccaggttcctgcaatgcaggctgacagcagggagcccaacagatgctggacaaaaatgaaagttgccaagatgaaacacccagtgccgcagcccagagaggacttgcaagtcctgaccgttctggaggcatgggctcagcctcggaaatgcttgccgcgcttgcagttgaaagcgccggtgtcaaagtaagcattgagaagctgcctcctcaacccaaagatcaaaaggagcatgctgctgatggccctcagctccaaagcttagcccaggcagaggccagtgcctctggaaacctaaccaaagaatccccagacaccaacggaccaaagctaaccgaggagggcgatcgcccaaaagttgaggtccaggaagaagaaatgtctaccaagtcagtcaaagagaacaaggcccaggcagaagaggacctgcaggagccaaagggagacctggcagaatcctaagatgttagttgctcattgtacatctgtaagaccagaatgtgaaaacaagtcacagaacaagatgctgctgttgggaccttgagaccaagatttcagagcccatgagatccagagagcagggccgtccaatgatttccaccc

SEQ ID NO: 1028 - DNA, 789 bp, Rattus norvegicus
cggaattccgatctgttctgcaaaggggacagcaaggtacctttaggctaaaggactcggcgtccagtattctagttgaagatctaaagagaaagccaccttgctgccactatgcctaacttttctggcaactggaagatcatccgatcggaaaactttgaagaaatgctaaaagctctgggggtgaacatgatgatgaggaagattgctgtggctgcagcctccaagccagcagtggagatcaaacaggagaatgatgacactttctacatcaaaacctccaccactgttcgaaccacggagattaacttcaagatcggggaggaatttgaagagcagactgtggatgggagaccctgtaagagtttggtgaaatgggagagtgaaaacaaaatggtgtgcgaacagaggcttctgaagggggagggccccaaaacctcctggagccgagaactgaccaatgatggagagctaatcctgaccatgacagcagacgacgttgtatgcaccagggtctacgtccgagagtgagtgcctatgtcccaagaacttcttctgggaggcccaccaaacctccctccctcccatgtccattttacaaactagctctccccttactcctgagggtcactctctatgccagagaggggcagactaccaaagctcagaacccttccatttgcctggtcagaagtcccagctccataccaggatccttcctggaagagactgtctctctggcctctactctttatccttgtagtccaagtgatttagaatatttattgg

SEQ ID NO: 1029 - DNA, 1188 bp, Rattus norvegicus
atggtgacgatggaggaactgcgggagatggactgcagcgtgctcaaaaggctgatgaaccgagatgagaacggcggcacggcgggcagcagcggcggcagccacggcgccctggggctgctgagcggcggcaagtgcttgctgctggactgcaggccgtttctggctcacagcgcgggctacatccgaggctcggtgaacgtgcgctgcaataccatcgtgcggcggagggccaagggctccgtgagcctggagcagattctgcccgccgaggaagaggtgcgcgcccgcctgcgctctggcctctactcggctgtcatcgtctacgatgagcgcagcccgcgcgccgagagtctccgggaggacagcacagtgtcgctggtcgtgcaggcgttgcgccggaacgcggagcgcacagacatctgcctgcttaaaggtggctatgagaggttttcttctgagtacccagaattctgctctaaaactaaggccctggccgccatcccaccccccgtacctcccagcacaaatgagtccttggatctgggctgcagctcctgtgggaccccactgcacgaccaggggggtcctgtggagatccttcctttcctctacctcggcagtgcctaccacgctgcccgcagggacatgcttgatgccctggggatcacggctctactgaatgtctcctcagactgccccaatcactttgagggacattaccagtacaagtgcatcccggtagaagataaccacaaggctgacatcagctcctggttcatggaagccatcgaatacatagacgcagtgaaggactgccgagggcgagtgctggttcactgccaggccggcatctctagatcagccaccatctgcctggcctacctgatgatgaagaaacgggtgaggctggaggaggctttcgagttcgtcaagcagcgccgtagcatcatctcgcccaacttcagcttcatgggccagttgctgcagttcgagtctcaggtgctcaccacgtcctgcgcagcggaggccgccagcccttccgggcccctgcgggagagggggaaggccactcccacccccacctcgcagttcgtcttcagcttccccgtgtccgtgggtgtgcacgcggctcccagtaacctgccgtacctgcacagccccatcaccacctcccccagctgttag

SEQ ID NO: 1030 - DNA, 1392 bp, Rattus norvegicus
ccgggatccctgcgcgccgtggtgttctgtgccttgccggtctgttccctccgattgtgcctagcaatgaccacccagcagattgttctccagggcccgggaccctggggtttccgactcgtgggcggcaaggactttgagcaacctctcgccatttcccgggtcactcccgggagcaaggctgctatagctaacttatgcataggagatttgatcacagccattgatggggaagataccagcagtatgacacacttggaagctcagaacaaaatcaagggctgcgtagacaacatgacgctcacagtatccaggtctgagcagaagatttggtctcctctagtgaccgaggaggggaaacgtcacccctacaagatgaatttagcgtcggaaccccaagaagtcctgcacatcggaagtgcccacaaccgtagtgctatgccatttaccgcctcacctgctcctggcacccgggtcatcacaaaccagtacaacagccctaccggcctctactcatctgaaaacatctctaacttcaacaatgcagtggagtcaaagacctcagccagtggggaggaggcgaacagcaggccctcggctcagcctcatccctccggcggccttatcatcgacaaggaatccgaagtttacaagatgcttcaggagaagcaagagttaaacgagccccccaaacagtccacatcattcctggttctgcaggagatcctggagtcggatgggaaaggggaccccaacaagccatcaggatttagaagtgttaaagctccagtcaccaaagtggctgcatctgttggaaatgctcagaagctgcccatctgtgacaaatgtggaaccggcattgttggtgtgtttgtgaagctgagggaccatcatccccaccctgaatgttatgtgtgcaccgactgtggcatcaacctgaaacagaagggccatttctttgtaggggatcagatttattgtgaaaagcatgcccgggagagggtcacaccacctgagggctatgatgtggtcacagtgttccccaagtgatcgagaggacctgccctgtctgctgccctccagcctgcctgctgcacctggttgtcagaatgttctggttctctcctccctgacagtcctgtgcttagtgttagtcctgctcagtaaacattgagtttctcctgtactgactgaccctgactggcagtgtgacacctgcttttacattaccgggaggtggttttgtccctgtcccctcacccacaccacaatgcaccttcttcccttggagtcttccctgctgaaaatggacattggtcacattggaattaagccaaatgttttatctctgatgttactttgttttacttaataaatttagactttaaagcc

SEQ ID NO: 1031 - DNA, 3616 bp, Rattus norvegicus
ccagcccggagcgacagccgcgggcgctccgcaacaccaggtgaacagccatggcgggctggattcaggcccagcagctgcagggagacgctctgcgtcagatgcaagtgttatatgggcaacatttccccatcgaggtccggcactacctggcccagtggatcgagagccagccgtgggatgctattgacttggacaatccccaggaccgaggccaggccacccagctcctggagggcctggtgcaggagctgcagaagaaggcagaacaccaggtgggggaagatggctttgtgctgaagatcaagctggggcactatgccacgcagctccagaacacgtacgaccgctgtcccatggagctggttcgctgtatccgtcacattctgtacaatgaacagaggctggtccgagaagccaacaattgtagctcccctgctggtgtcctggttgacgccatgtcccagaagcaccttcagatcaaccaaacgtttgaggagctgcgcctgatcacacaggacacggagagcgagctgaagaagctgcagcagacccaagagtacttcatcatccagtaccaggagagcctgcggatccaagctcagtttggccagctggcccagctgaacccccaggagcgcatgagcagggagacagccctccagcagaagcaagtgtccctggagacctggctgcagcgagaggcacagacactgcagcagtaccgcgtggagctggttgaaaagcaccagaagaccctgcagttgttgaggaagcagcagaccatcatcctggacgacgagctgatccagtggaagcgggggcagcagctggccgggaacgggggtccccccgagggcagcctggacgtgctgcagtcctggtgtgagaagctggccgagatcatctggcagaaccggcagcagatccgcagggctgagcacctgtgccagcagctgcccatccctggccccgtggaggagatgttggccgaggtcaacgccaccatcacagacatcatctcagccctggtcaccagcacgttcatcatcgagaagcagcctcctcaggtcctgaagacccagaccaagttcgcggccaccgtgcgcctgctggtgggcgggaagctgaacgtgcacatgaaccctccgcaggtgaaggcgaccatcatcagcgagcagcaggccaagtccctgctcaagaacgagaacacccgcaatgattacagtggcgagatcctgaacaactgctgcgtcatggagtaccaccaggccacaggcaccctcagtgcccacttcagaaacatgtcactgaaaagaatcaagcgtgctgacagacgcggtgccgagtctgtgacggaggagaagttcacggtgctgtttgagtctcagttcagcgttggcagcaacgagctggtgttccaggtgaagaccctgtccctccctgtggtcgtcattgttcatggcagccaggaccacaatgctactgccaccgtgctgtgggacaatgcctttgctgagccgggcagggtgccatttgccgtgcctgacaaggtgctgtggccgcagctgtgtgaggcgctcaacatgaagttcaaggctgaggtgcagagcaaccggggcttgaccaaggagaacctcgtgttcctggcacagaaactgttcaacaggaggagcaaccacctcgaggactacaacagcatgtccgtgtcctggtcccagttcaaccgggagaacttgcccggctggaactataccttctggcagtggttcgacggggtgatggaggtgctgaagaagcatcataagccccactggaatgatggggccatcttgggtttcgtgaacaagcagcaggcccatgacctgctcatcaacaagccagatgggacctttctgctgcgattcagcgactcggaaatcgggggcatcaccattgcttggaagtttgactccccggaccgaaacctgtggaatctgaagccattcaccactcgggatttctccattcggtccctggcggaccgcctgggggatctgaattacctcatctacgtgttcccagaccgacccaaggatgaggtctttgccaagtactacactcctgtacttgcaaaagcagtcgacggatacgtgaagccacagatcaagcaagtggtccctgagtttgtcaatgcttctgcagatgctggagccaacgccacctacatggaccaggctccttccccagtggtgtgccctcaggctcactacaacatgtacccaccgaaccccgaccctgtccttgaccaagatggtgaatttgacctggatgagaccatggatgttgccaggcatgtggaggaacttttacgccggcccatggacagtcttgacccccgcctttccccacctgctggcctcttcacttctgccagaagctccttgtcctgaacgctggactccatgcttctcttggaaaagcaccttcagtgtgaagaacccgtgtcagttgtatccctgttcataccagtggctttgcaccttcgcagttccgccttgcccacagtgcggggtctggctaaagtagtggtggccttttcactcagacctcaagggtcccctggacctctcctctaagagctgaacctgtcattgctgacaaacctatttctccagtgcccttcacctgccaggggccactgagtgaaatgattctagaaaaggaagggaggcaagtttatgcaactaaagttggagttttactcctgagctagaagcttcctccggactggtgtgcgtgcacctgtcctcgcacatgtggtagcctaactgatgaacccctctaaagggagattggggctaaccttagtaaccctttatacgttagtgaatatgggctgcggattttgtgaccgctcacaatgtgcataagctgttcccaccaacacaggcggctgccaaagctgactgtgtcagttctcaaaccagcgtggacatgggattcgggtctaaggcctcatctgcatcccttcttccccatccgatgtcctcacccttccatatagattcatccttgctttttgttttgcttttttgagacagggtctctccatatatcccaggctgtccatgaatgatcctcctgcctcagcttctggagtgctaggattataggtttgcatgaccacacctgcctcagcctttcttcctttcctgcttgcaaccttgcttgttatcagaaaggaggggaatactgggtgcctgggattaggagacctagggcgaaaaccttgtagcccacgaaaaggaacagagctgccagttactgcaggcaacacagtggtatgtgaggggggaggctcaacctggtccactctgctgggaggtaggacccggaacaggccctgcctgtgcaacatgggtgtggtctaggaaggcctctcgcaggcagctcttcccttggaggctgtgatagagcggccaggactagctgactaggagtcctggcttccaacctgagggaagcagaggatgcacagagggatggtttttatattttgtacatagaactcacatttatggaaacagtgtttttgaataaaatttctgttgggtttgtttttgcaaaaaaaaaa

SEQ ID NO: 1032 - DNA, 2529 bp, Rattus norvegicus
tgggggtggaggatctcatcctcctggagcctctggatgaggagtctctgatcaagaacctccaacttcgttatgagaaaaaagagatttatacgtacattgggaatgtggtgatctccatgaacccctaccagcagcttcctatctatggcccagagtttattgccaaataccgggactataccttctatgagctgaagccccacatctatgctttggcaaacgtggcctaccagtcgctgaaggatcgggaccgggaccagtgtatcctgatcactggcgagagtggagctggcaagactgaggctagtaagctagtgatgtcctatgtggctgctgtctgtgggaaaggggagcaggtgaactcggtgaaggagcagctgcttcagtcaaacccagtgctggaagcatttggcaatgccaagaccatccgcaatgacaactcctctcgatttggaaaatacatggacatcgagtttgacttcaaagggtccccccttggaggtgtcattaccaactatctgcttgagaagtccagagtggtgaagcaactcaaaggggaaaggaacttccatatcttctatcagctgctggctggagcagacacacagctgctgaaggccctaaagcttgaggaagatgcacgtggctatgcctaccttaatggggaggtgtccagggtgaacggtatggatgatgcctccaacttcagggctgtgcagaacgcaatggcagtgattgggttctcagaggaggagattagacaagtgctggaggtgacagccctggtactgaagctgggcaatgtgaagctggcaggtgaattccaggccaacgggcttccagccagtggtgtctgtgatgggaaaggtattcaggagattggggagatgatgggtttgaactctgtagaactagagaaagctttgtcctcaagaaccatggagacaggcaaagagaaggtggtcacggtgctgaacgtcatccaggctcagtatgctcgggatgccctggccaagaatatttacagccgactcttcgactggatagtgaatcgcatcaacgagagcatcaaggtgggcactggggagaagaggaaggttatgggggtcctggatatctacggctttgagatactggaggataacagctttgagcagttcgtgatcaactactgcaatgaaaaactacagcaggtgtttatagaactgaccttgaaggaagaacaggaggagtataagagagaaggcataccatggacaaaggtggagtactttgacaacggcatcatctgtgacctcattgaacatagtcagcgaggcatcctggccatgctggatgaggagtgcctgagacctggggtggtcagtgacaccacttttctagcaaagttgaaccagcttttctccaagcacagtcactacgagagtaaagtcacccagaatgctcagcgccaatacgaccgcaccatgggcctcagctgcttccgcatctgccactatgcgggcaaggtgacatacgacgtgaccagtttcatcgacaagaataacgacctactcttccgagacctatcccagacaatgtggaaggcccagcatcccctcctccactccctgtttcccagaggtaatcccaaggaagcatctcccaaacggcccccgactgctgggacccagtttaagaattcggtggccatactcatgaagaacctgtattctaagaacccgaactacatcaggtgcataaagcccaatgaccagcagcagcaaggcaggttcacctcagaactggttatggtccaggctcgatacctggggctgctggagaatgttcgggtgcgcagggctggctacgccttccgccaggcctataagcctttcctggagaggtaccgattgctgagccggagtacgtggccgcgctggaatggggaagaccgggaaggtgtggagaaggtcctggggtctctgattttgtcatcagaggagctggcctatgggaggacaaagatcttcatcagaagccccaagactcttttctacctggaagaacaaaggcgcctgaggcttcagcagctggccaccctcatccagaaggtttaccggggctggcgttgtcggacccactaccagcagatgcggaagagtcagatcctgctctcggcttggtttcggggcaacaagcaaaagaagcactatgggaagatccggtcatcagtactgctgatccaggctttcgtgaggggctggaaggcccgcaagaactatcgaaaatacttccggtcaggcgcccgcatcactttggcaaattttatctaccagagcataacccagaaattcctcttgaatctgaagaagaatttgccatccaccaaagtgttggacaacacgtggccagctgccccttacaggtgcttcaacacagccaatcaggaactgcagcacctcttctaccagtggaagtgcaagaagtaccgagatcagctgtccccgaagcaggtgcagacactgagggaaaagctctgtgcca

SEQ ID NO: 1033 - DNA, 3259 bp, Rattus norvegicus
cagctccggcgggcagcaggcgctggagcgcatcgcagttcagctcagcgcagcaccatcggtctgcggagcggactgagctagaagcggagcgctgacgccggaggcgtgcaatgaggagggcaggtgctgcctgcagcgccatggaccggctgcgcctgctgctgctgctgattctaggggtgtcctctggaggtgccaaggagacatgttccacaggcctgtacacccacagcggagagtgctgcaaagcctgcaacttgggcgaaggcgtggcccagccctgcggagccaaccagaccgtgtgtgaaccctgcctggacaatgttacattctccgatgtggtgagcgccactgagccgtgcaagccgtgcaccgagtgcctgggcctgcagagcatgtccgctccctgtgtggaggcagacgatgcagtgtgcagatgtgcctatggctactaccaggacgaggagactggccactgtgaggcttgcagcgtgtgcgaggtgggctcgggactcgtgttctcctgccaggacaaacagaacacagtgtgtgaagagtgcccagagggcacatactcagacgaagccaaccacgtggacccgtgcctaccctgcacggtgtgcgaggacactgagcgccagttacgcgagtgcacgccctgggctgatgctgaatgcgaagagatccctggtcgatggatcccaaggtctacgcccccggagggctccgacagcacagcgcccagcacccaggagcctgaggttcctccagagcaagaccttgtacccagtacagtggcggatatggtgaccactgtgatgggcagctcccagcctgtagtgacccgcggcaccaccgacaacctcattcctgtctattgctccatcttggctgctgtggtcgtgggccttgtggcctatattgctttcaagaggtggaacagctgcaaacaaaataaacaaggcgccaacagccgccccgtgaaccagacgcccccaccggagggagagaaactgcacagcgacagtggcatctctgtggacagccagagcctgcacgaccagcagacccatacgcagactgcctcaggccaggccctcaagggtgatggcaacctctacagtagcctgcccctgaccaagcgtgaggaggtagagaaactgctcaacggggatacctggcgacatctggcaggcgagctgggttaccagcctgaacatatagactcctttacccacgaggcctgcccagtgcgagccctgctggccagctggggtgcccaggacagtgcaacgcttgatgcccttttagccgccctgcgacgcatccagagagctgacattgtggagagtctatgcagcgagtccactgccacatccccagtgtgaactcacagactgggagcccctgtcctgtcccacattccgacgactgatgttctagccagcccccacagagctgccccctctccctcggggatggcccaacggtcagaacggagcatctctgtgcagggcctctgtgttcccactcctgactccgttgctgctcccgagggggcccttgcttctgaccaccctctcctcagcaagagagagagagaggaccacccgagcctgacttgctccatttccatctcaggcctttccttcctttctacacattagctgtgtcagatctgggggtttgacactaggagaagggagcgggggcacccctaagactcaggaggtactgaagaaccagagccatggactccacactgtgaaccggagaacaaggggcggggcattgtggtaggctagaccttccttagcccctcccttctcccctctggccaaagaagaggattacggacctatctgagctgaaagcaggtttggaacccagcccacacttctctctcacacacaggatggtaaaacccagagaaaggcagggactgacctaggccacccaaccacaggaagaacaaatgaaggctgatacactccgtttctgaatgagggcgtcaagtgtgcttgttgacagggatggcgtgactttcagggaaatatctggaagccatgtctgccccgccctcaaccacttccaggcccctacccaacccttgtgcagatgaactgtttgttcaagggctggtccattggtctattctgatggagtcaagctaagggctcaggcttatccataaggcatttgtggagagatgaatctgttagtgcgctcattcttggcataagcctgaagccaacacggcccttaatgtcagccctcggggtcaggaaccaaggactcccaccccacaatccaacactatactacattacacacacacacacacacacacacacacacacacacacacacacacagatatcttgcttttctccccatggctcttttggggctgagactagatcctgctgggagtcactgccagtgagagatccggaggggacagagctgagcttcatggggctgtcttcctcgcccccgggtctggcaggccaagaatgactgcatctgagctggtgtctgtcttccaatggcctgtgcgtggaggaaatgctcccactcctccccttcttgaagctgcccccagaagactacagtgcaaaagagcagactggtgtgagaacacaagaaaaagcagatgctggccctgcagtctgtggcagctttctcctcagcttcaaggcccctgcaaaggacggatttcctgagcacggccaggaaggggcaagagggttcggttcagtggcgctttctcccggctccttggcctgttctgttttgcttgctgttggaatgagtgggcaccccctctatttagcatgaaggagccccaggcagggtatgcacagactgaccaccatccctccccacccagggtccacccaacccggtgaagagaccaggagcattgtacgcatacgcgggtggtatttttatggaccccaatctgcaattcccagacacctgggaagtgggacattctttgtgtatttattttcctccccaggagctggggagtggtggggggctgcaggtacggtttagcatgtgtttggttctgggggtctctccagccttgttttgggccaagttggaacctctggccctccagctggtgactatgaactccagaccccttcgtgctccccgacgccttccccttgcatcctgtgtaaccatttcgttgggccctcccaaaacctacacataaaacatacaggaggaccattaaattggc

SEQ ID NO: 1034 - DNA, 2681 bp, Rattus norvegicus
gagtgcagagagccaagccgggtgcaggagttttcttactgtgactataccatggaaaatcaattggctaagtcaattgaagaacgaacattccagtaccaggactctcttccgcccttgcccgttccttcgcttgaagaatcactgaagaagtaccttgagtcagtgaagccatttgcaaatgaagacgaatacaagaaaactgaagaaatagttcaaaagtttcaagatggagttggcaagacattgcatcagaagttacttgaaagggctaaaggaaaaagaaactggctggaagagtggtggctcaatgtcgcctacttggatgtgcgtattccatcacaactgaacgtgaactttgtgggtccgtctccccactttgaacactactggcctgcaagggaaggcactcagttggaaagaggaagcatactactgtggcacaacttgaactactggcagctgctaagaagagaaaaattgcctgtacataaatctggaaatactcctctagacatgaaccaattccggatgctgttttctacctgcaaggttccgggaatcactagagattcgattatgaattattttaagactgagagcgaggggcattgtccgacccacattgccgtgctgtgtcgaggcagagcgtttgtcttcgatgtcctccatgacggttgtttgatcaccccaccagaacttctcagacaactgacatacatctaccagaaatgctggaatgaacctgttgggcccagtatagcggcattaaccagtgaggagcgaactcggtgggcgaaggcaagagaatatctgattggtcttgatccagagaacttgactttattagaaaaaattcaatccagtttatttgtgtattccatagaagacaccagtccacatgcaaccccagaaaatttttctcaggtctttgaaatgcttcttggtggagatccagcagtgcgctggggtgacaagtcctataatctgatttcctttgctaacggaatatttggctgtagctgtgatcatgctccttatgatgcaatgcttatggtgaacattgctcactatgttgatgagaagctcctagagacggaagggagatggaagggttcagaaaaagtccgggatataccgttgccagaggagctggctttcactgtggatgagaagatactgaatgacgtctaccaagccaaagcccaacacctcaaagcagcatctgatttacagatagcagcatctaccttcacatcttttggcaaaaagctcactaagaaggaggcccttcaccctgacacctttattcagctcgctcttcagctcgcctactacagacttcatggacgccccggttgctgctatgaaacagctatgacaagatacttttaccatggccgaacagagactgtgcgatcttgtacagtggaggccgtcaggtggtgccagtccatgcaggatccttctgccagtctccttgaacgtcagcaaaagatgttagacgcttttgcaaagcataacaagatgatgagagattgttcccatggaaaaggatttgaccgtcaccttttaggccttttgctcatagcaaaagaggaaggcctccctgttccagaactgtttgaggatccacttttctccagaagtggaggaggtgggaattttgtgctgtcaacaagtctggttggttacttacgaattcagggagtcgtggttcccatggtacataatggatacggctttttctaccacatcagagatgacaggtttgtggtgacatgttcatcctggaggtcatgtcttgagactgatgcagaaaagttagtggagatgatttttcatgctttccacgatatgatacatctgatgaacacggctcatctttagagactcagagacatacaggtcacagaaactgggtacggagaatgggatggtgatacgacatggaaggaatgttgacttaaaggaaacctgttaatgcagggattagagagggatgcactctagatttattctaccttaaagccttctgttgcaacagcaatgcaaactcagacatagtgaatagaactatgcaatgttttaagcctcaacaatgcacatctgtatattttaacaatacaaatcctactctaatgttaaaatatttttgttggcacatgtgtaggttgcaagtcctctgtgaacataattatagagtatttctcaagcactttaatactttctaatggccagagggtataaaacccatggttagatgctaatttccctgacatcagtgccttctacatccagcacaggagtacaagcctatgagatttcatgggaaaaccactattgttcaatattgatctaaaatagctcctttgaacagacaaaagtatcaagttgtattagaaaagaatattagcaaaactcattatgatatgttgtaattaattttgtgaatataaaatcaaaacacttccatttaaatctacttggtagagttagtggctttaaagggttaaatgtcgagtatgattctcagaactttataattatttcccactgttattcaaaatgttagcatatagacattctcccattgtaattcagtgtttatattctcaaagaataaagcatccagaatccttgtaatttctcatttattttcaataaaaatgattcctgat

SEQ ID NO: 1035 - DNA, 5582 bp, Rattus norvegicus
  misc_feature (1)..(5582): n = a or c or g or t
cgggcgggcttctcggggagctctgtgatgctctacatcgagcctgccggcagcatctctactggatcccacaggcatccaacgctggaggcctcgcggtatctcgggtgtcaacacaccggatgatggatctgtttgtccttccgtgacgcaatgccatgtagtccaacggcaagcatgtatgggatactgccattgtagggatccagggcctggagacggctctgctttggggaatcaggtgaggtgaccaaggaacaagaagcataccctcaccaatgacatcatgacagcaagagagcacagccctcgccatggtgccagggcccgtgcgatgcagcgggcttccaccattgacgtgacagccgacatggtgggcctctctctggcaggaaacatccaagacccagatgagcccattttagagttcagcttagcttgcagtgagcttcacactccatcgctagatcgaaaaccaaatagttttgtggctgtgagtgtcaccacccctccacaggcattctggacgaagcacgcgcagacggagatcatcgagggaaccaacaaccctatctttctgagcagcattgccttctttcaagactctctcatcaatcagatgacccagatcaagctgtcagtgtacgacgtcaaagacagatctcagggaacaatgtacttgctgggctctggaacattcgtggtcaaagacctgctccaggacaggcatcaccgattgcatctgacactgaggtctgcagagagtgaccgagtcggtaacataactgtgatcggctggcagatggaggagaagtcagaccagcagccccctgtgacccggtctctggacactgtcaatggcaggatggttttgcccgttgacgagagcttgaccgaggccttgggaatccgatccaaatatgcttctttgcgaaaagacagcttactgaaagcggtgtttggtggtgccatctgccgcatgtaccgcttcccaaccaccgatggcaaccacctacggatcctggagcagatggcagagagcgtcctctcgctgcacgtgcctcggcagtttgtgaagctcctgctggaagaagatgcagccagagtctgtgagttggaagagttgggggagctgtccccttgctgggagagcctccggcgccagattgtcacccagtatcagactattatcctcacctaccaggagaacctgactgacctccatcagtacaaaggtccttcgtttaaagcaagcagcttgaaagcagataaaaagttagaattcgttcccacaaacctgcacatacagaggatgcgagttcaggacgacggcggctcagatcagaactacgacgtcgtcactattggagccccagcagcacactgccaaggttttaagtcaggaggtcttcgaaaaaagctgcacaagtttgaagaggccaagaagcacagttttgaggagtgttgtacatcttctacctgccagtccataatctacataccacaggatgtcgtccgggccaaggagatcattgctcagatcaacaccctgaaaacccaagtgagctactatgcagaacggctctcaagggcggcgaaggacaggtctgccactggccttgagaggactctcgccatcttggcagacaagactcggcagttggtgactgtctgtgactgtaagctgttggccaactccatccatgggctgaatgcagcacggcctgactacatcgcttccaaggcctcccctacctcgactgaggaggagcaggtgatgcttcggaatgaccaggacaccctcatggccaggtgggcagggaggagcagccggtcttccctgcaggtggactggcatgaggaagagtgggagaaagtgtggctgaatgtggacaagagcctggagtgcatcattcagcgggtggacaagctgctgcagaaggaacgtctgcatggggagggcggcgaggatgttttcccctgttcaagcacctgttccagcaagaaagattgcagcccccctcctgaagagtcctgtccaggtgagtggagcgaggccctttaccctctgctgaccaccctcacagactgtgtggccatgatgagcgacaaggccaaggcagccatggtcttcctgctcatgcagacagctgcccccacaatcgcctcttacctcagcctgcagtatcgccgtgacgtcgtcttctgccaaaccctgaccgccctcatctgtggctttatcatcaagctgaggaactgcctgcacgatggtggcttcctacggcagctctataccatcgggctcctggcccagtttgagagcctgctgagcacctatggagaggagttggccatgttggaggacatgagccttgggatcatggacctgaggaatgtgacctttaaagtcactcaggccacttcgaatgcttctagtgacatgctgccagtcatcacaggaaaccgggatggctttaacgtgcggattcctctgccaggcccactgtttgactctctccccagagagatccagagcggcatgctgctgcgggtgcagcccgtcctcttcaacgtgggcatcaatgagcaacagacactggccgagaggtttggagacacatccctacaagaagtcatcaatgtggagagcctggtgcggctgaattcctactttgagcagttcaaggaggttttgccagaggactgtctacctcgatctcggagtcagacctgccttccagagctgctgcggtttctaggacagaatgtccatgcacgcaagaataagaatgtggacatcctctggcaagctgctgaggtctgtcgccgccttaatggggtccgattcaccagctgcaagagtgccaaggaccgcacagccatgtcggtgaccctggagcagtgtctgatcctgcagcatgagcacggcatggccccgcaggtcttcacacaagccctggagtgcatgcgcagtgagggttgtcggcgagaaaacacaatgaagaatgttggaagtcgcaaatatgcatttaactccctgcagctgaaggccttccccaagcattacaggcctccagaagggacttacggaaaagttgagacatgaacacacggtgtcctctaattagctgtcatgtaatcaatgtgggtccctctagtgtcacatacattcttcaagaagacctgaaggattggtttttatttctgtgtttttaaagacatgtcactggagagtccacggagcatgattttgtgctggaatctgtagggttacgtgtgggtcgatagcgtggatagaaagccgccctcaaccacagctttcagtgtaactgtacagttaatgtcatagttcctagaagatgccagctaggtctcatacactccagcaggctttctcaaatagccacttaggccctgctcaccccctttacctttctattcagtaactcacaagtgagcactgacttaaaatcttctttcaaaaagactgactataaagcaggaagtacctaacctgtgcacttcaggtcccaggtagagcagcaggtagagcagcaggtagagcagcaggtagagcagcaggtagagcagcaggtagattctgactcagtctgggggagaacctgcatgctatgacaggctggtgctcgtggccctaaaaggcaccaagctctgtgaaccgaaagtggaaggaaagcttggttggtacaccaggagctcacacacctggacccacactgttcctccccctcacaagtcatggatgagtgtctgcttaagatgtaaagccagtattgaggtcctggactctccccccaccccacccccaccccaccccacccccaccccaccccaccccggatgctccgtgtatgtttagccctacccacagggtgtttctccctttgttctccagcagtcaggaccttcaatgtggcttgtcaggtgtctggatttagggccagagagacagtagaaacttagatattttcaaagtagatgttcttctgggagcttcgtaatagtcttctagaagaccaataaatcatgtttgaatgtctagagaaagcatcttagtttctggtttgcaatgatggttacggtcccccttctgtttcacggctattgataaacagttgaaactgtcccctaccttgagagtctgagatgagattatggaacagggaatgagggattttgtagacactgtaatctgctcatcttttacaaggtgacggtgagtcttgtctgcacgtggcagattttttttccttagagatttatatgtttataagttctgttcaccgtaattctgtttacatgttatttaaaaggctgtaaaaagaaatgtatatgaactgtattcgtgacactgatactaatgacctgtaccaccatgggaactcgtaggcaagtctaggtagttttcttttggctcctttagaaaaacacgtaacagcttggatctgaggcatttgaggtatcaataggaccagtcttggcaagagacagggagggtgcgggcatccctctaccccagtgtgcagacagcctcctgtctctggtgcctgctgggaggaagatgtgccctgctaaggggtgtgtgctcactgccccaccctcaaggcaaggcactgtggaaggtgagtggctaagctctctttacccaacccttccctcggggtctgctctgctggtctcacattgtcctgaagcctcaggccctgatcaaagatggctgagtctcagtgcggcggctaagccttttaacttgttgttggttcacttactcttagcttttagtttttgttcgttcatttttttcttattttgacatcactgccttttaaaaatatttcttcagattttagaatgaaatgtttcccatgttctccagngttcctttctgtccacagggcatttgacttgtccacagggcatttgacctgtccacatttataaagggaacaggcgaagctgacttatttgtcagcttctgcatgtgaattcttgtctcagtttctgtttataatatgaatcactgtaaaactctaagacttggctaatcacgtaaaagattgtggcttcagtgttttctctgaaggcattgtgactggcttccagagcatcacacacgcccagaagggtcatctcgcacagcacaggctcagcaagccctgggccgctcacaggaggccgaactgttccctgtggaggaaaacagttctacagctttccagtgaacaacgttccgtccggcacctttccccatttaggaaggaatgtgcagtctctgggcggtgggcatgccgtgcggatcctgtcagagctcctgcagcacatctgcctttactgtcctttaaggatgtataaatgctgtacagtgctgttgtatctcccgacacgtgttttcgctcagcttagtgcatttaaatacttgtatttatttatttgtttgggacatattaatatatatgaacatatagttactgttttatatattattagcttattcaaagccatgatgctgtaaatgtgcttgtctttagaatgataaataataaaaactgacaagaacattg

SEQ ID NO: 1036 - DNA, 2772 bp, Rattus norvegicus
ggcacgaggaaaggcgcaggggtgggagctgtcgccggagctgccacagcaaaagttctctcccctccccctcgccctcctcgccgggcccgtgggaaggtcggagctgcggccgtctgcagtcagtgaccgcgcgcctcggcgcagccgcggatagaagagaagaatcagtggcttggaaatttagccaagtgatctggcgggatgggctcatgcctgacacactttatagaggcatcggatggcacaagtgactgagaggatcctgtgagtttctggagcctgtgaaaggtagaaactcaaccatgatttctttctcaactcaacagcattcccttccttgaagtcttcagtttttacttcagcctcaggcagttatacttaagcatgaacattgacgacaaactggaaggattgtttcttaaatgtggcggcatagacgaaatgcagtcttccagggcaatggttgtaatgggtggagtgtctggccagtccgccgtgtccggagaacttcaggagtcagtacttcaagatcgaagtttgcctcaccaggagatccttgctgctgacgaagtgttacaagagagtgaaatgagacaacaggatatgatatcccatgatgaactcatggtccacgaggagacagtgaaaaatgacgaagagcagacggacacccacgagcggcttcctcaaggactgcagtatgcgcttaatgtccccataagtgtaaagcaggagattacttttactgatgtatctgagcaactgatgagagacaaaaaacaagtgagagagccagtagacttacagaaaaagaagaagcggaaacaacgctctcctgcaaaaatccttacaataaatgaggatggatcacttggtttgaaaacccctaaatctcacgtctgtgagcactgcaacgctgcctttagaacgaactatcacttacagagacatgtcttcatccatacaggcgaaaaaccgtttcaatgtagtcagtgtgacatgcgtttcatacagaagtacctgctccagagacacgagaagatccatactggtgaaaaaccatttcgctgcgatgagtgtggaatgagattcatacagaaatatcacatggaaaggcacaaaagaactcacagtggggagaagccttaccagtgtgaatactgcttacagtatttttccagaacagatcgtgtattgaaacataaacgtatgtgccatgaaaatcacgacaaaaaactaaacagatgtgccatcaaaggtggccttctgacatcagaggaagattctggcttttctacgtcaccaaaagataattcactgccaaaaaagaaaaggcaaaaacctgagaagaaatcgtccgggatggacaaggagagtgtcctggacaaatctgacacgaagaaagacagaaacgattacctgcccctctactcgtccagcactaaagtgaaggacgagtacatggtggcggagtacgctgttgaaatgccccattcctcagtgggagggtcccatttagaagacgcttctggagagatacacccacccaagttggttctcaaaaaaatcaatagtaagagaagtctgaaacagcccctggagcaaagtcaaaccatttcacccctatccacttacgaagacagcaaagtttccaagtatgcatttgagcttgtggataagcaggcattactagactcggaaggcagtgctgacatcgatcaagtggataacttgcaggaggggcccagcaaacccgtgcacagcagtactaattacgacgacgccatgcagttcctgaagaagaagcggtatctccaggctgcaagtaacaacagcagggagtacgcactgaatgtgggcaccatagcttctcagccttctgtgacacaagcagccgtggccagcgtcattgatgaaaacaccacagcatccatactagattcccaggcactgaatgtggagattaagagcaatcatgacaaaaatgttattccagatgaggtcctgcagactctgctggatcattattcccacaaagctaatggacagcatgagatttccttcagcgttgcagataccgaagtgacttctagcatatcaatcaattcttccgatgtacccgaggtcacccagtcagagaatgttggatcaagctcccaagcatcctcctcagataaagctaacatgttgcaggagtactccaagtttctgcagcaggctttggacagaactagccaaaacgatgcctatttgaacagcccgagccttaactttgtgactgacaaccagacccttccaaatccgccagcattctcttccatagacaagcaagtctatgcggccatgcccatcaatagctttcgatcaggaatgaattctccactaagaacaactccagataagtcccactttggactaatagtcggtgactcacagcacccatttcccttttcaggtgacgagacaaaccacgcctctgccacgtcaacagcagactttttggatcaagtaacttctcagaagaaagctgaggcacagcctgtccaccaggcttaccaaatgagctcctttgaacagcccttccgtgctccataccatggatccagagctggaatagcaactcaatttagcactgccaatggacaggtgaaccttcggggaccagggacaagtgctgaattttcagaattccccttggtgaatgtaaatgataatagagctgggatgacatcttcaccagatgccacaactggccagacttttggctaa

SEQ ID NO: 1037 - DNA, 2620 bp, Rattus norvegicus
gggcggccgtgccacctcgccggaccggcgagggcaaaggggctgtggcgacgcatgcccgggccggagtgagtgagcgcgggcgaagatggcgtacatccagttggaaccactgaacgagggctttctttccagaatctctgatgtgctgctgtgtggatggacttgtcaacactgctgtcagaggtgctatgagtccagctgctgccagtctagtgaagatgaagtggagatcttgggacctttccctgcccagactcctccatggctgatggccagccggagcaatgacaaggatggtgactctgtgcacacagccagcgatgttcctttgaccccaaggaccaactcccctgatgggagacgctcatcctcagacacatccaagtccacatacagcctgactcggagaatctccagtctggattcccggcgccccagctccccactcattgacatcaaacctattgagttcggtgttctcagtgccaagaaggagcccatccagccatctgtgctgcgccgaacctacacccctgatgactacttcaggaagtttgagccccgactttactcccttgactcgaatcttgatgacgtagactctctgaccgatgaggagataatgtccaagtaccagctgggcatgctgcacttcagcacccagtatgacctgctgcacaaccacctcaccgtgagggtgatcgaggcccgggacctgccgcctccaatctcccatgatggctcccgccaggacatggcccattccaacccctacgtcaagatctgcctcctgcctgaccagaagaactccaagcagacgggagtcaaacgcaagacccagaagcctgtgtttgaggaacgctacaccttcgagatccccttcctagaagcccagaggaggaccctgctgctcactgtggtggattttgacaaattctcccgccactgtgtgattgggaaagtagcggtgcctttgtgtgaggtggacttggtgaagggcggccactggtggaaagctctgatccccagctctcagaatgaagtggagctgggagagctgctgctttctctaaactatctcccaagtgctggcagactgaatgtggacatcattcgagccaagcaactcctgcagacagatgtgagccagggttcagacccatttgtgaaaatccagctggtacacggactcaagcttgtgaaaactaagaagacatcattcttacgaggcacaatcgatcctttctacaatgaatccttcagcttcaaagttccccaggaagaactagaaaacgccagcctagtattcacagtgttcggtcacaacatgaaaagcagcaacgacttcatcgggaggatcgtcatcggccagtattcctccggcccctcggaatccaaccactggcggcgaatgctcaacacacaccgcactgctgtggaacagtggcatagcctgaggtcccgggctgagtgtgaccgagtgtctccggcctcgctggaggtgacctgatcgccataaggaaggcaaccttcatttgttaaaaaaagaggaaaaaaatgtgtcacataaatattcagcccacacctacgtatactttcacacatatgcacgtgcatacacaacgccctctctgtatcgagagccagctgacagttgatcatgaaacagcccacctcattgagggaagcttgtcgaagtttccagacactccattcatgtataatcacaagcctggtagactctgctgtgggacttactagcattgcctactctatccacactatgaccaaatgtacttcgaccctcaggccagagaaaggaggccttcctaggaagagccagagtcagtttaccaagagttcagctgttatttggggggcttgattccccacttcaaaaccatatcttccaggaaagttctgaacaggccactgttaactggggtcccttctccaacggtgtaagtactctttattttctccttagcaaatatgataaatagattagaccctttggagagaccaaagggtagcaaaagacagtaagttcgtgtcaggagcacactctcagctgctctgtccttgtgttaacttattgctgggactccttgtgggtgtgtgtgtgttattgtgagtgtgcctcacgggtaagtacatgtgtgcctgttcatcccattagacagcaaggcagtagccaggacctccatccatgaagctctcttgcctctgccttttatccaatgcaagtttaccccatatcctctcacacatcagagacccaacctgaggtagtgatagttcacatatgtccataatagggttttgatagagcagaggtaacatgtctgactgaattgtggtggttataaccattggggtttggcatgggacgagaatggtactacatccctccaccatgacctctccccaaaaccagactccagtgagccttctgtgtttctgtgtgcaccacagtcatgtctcatgtgctaaggctttagtgtagttagaatagagttccctcacaggatgcttctgtatctttctccacagcgtattgtcctctgtgatggggagttatctgttgttgaaataaaagattatttatttgtgaccc

SEQ ID NO: 1038 - DNA, 4359 bp, Rattus norvegicus
gccaggcgcgcagaagcaacgccaggcactgccggcagatcaactgggatcctcgaggcggcaagaggacagggacagcggggaccgcgactccagtaaaagtccagtcggcccggttacggccagctgcagaccagaacctactctcttggagccatttgtaagcaagagacgccaacgctgtgtgacatatgccggtgccaccaccaccacccccacctcttcctccaccccctccacctctgggagctcctccccctccacccccaccagggcccccgatcagcacagacgctcccagcttaaggaagtcagatctgaaaggtcggagtgcactgttggctgatatccagcaaggaacacgcctgcgaaaagtcacccagatcaatgaccgcagtgccccacaaatcgagagttcaaaaggaaccagcaaagagggaggagctgctggcagcaatgcccgtggaggaagcacgccccctgccctgggagatctctttgctggtggctttcctgtgttgaggccagcaggccagcgggatgtggcaggtggcaagaccggacagggccctggctcccgagcgccttctccccggctccccaccaaagccatcagcggcccccttcccgctcctgcatcccccaggctaggcaatgcctcagatacacacagctctgccaggccagtccctcctcgccccagtgtacctgccccaccgcctcccactacacccccacccccgcctccacctccacctccacctccacctccacccctccccccagcctcccccatcaaagccccatcggtgtccccacctgtccctccaaccaaggggaatccgtctgcggtgccagcccctataccctgcgtacctccccttccgccccctcccccgactccgccccctctgcccccagcctcagcactcagtgagaaggcagtgaggccccaactagccccgctgcacctgccacccataccacctccgcttcctctcctgccaccctatgggtacccggcgctccactcagagcccagcagccctgcccaggacgtgagagagccaccagctcctcctccaccaccgccaccaccaccaccacctccaccaccaccgctccccacctacgcctcttgctctccaagggccgctgtggccccgcccccgccccctttgccaggctccagcaacagcggcagcgagactcctcccccgctgccccccaagtcccccagcttccagacgcagaaagccttgcccacacctccaggtgctcccggccctcagatcatcctgcagaagaagcgtcgaggcccaggagccggtgggggaaagctaaacccacctccagccccacctgcaagatcgcccaccactgagctctccagcaaaacccagcagcctggaggacagctgcggaatggaggccagcacgtgattggccgcacacctggttcctggctccaagctgaggcagctgggcagagctctgatgacatcaaaaccagaaattctcagttatctctaaaggcactccggtgagaagatggtgacgtcaaggtcctggggttctggactagacaccaggacaactccttgagactctactgtactcaagatctactcctttgaatgcaggcaccgaactgagcatttattttttttgtaaataatgatttgcatgaagcccttaggcaccatgttagtcaactttcatttgagtaacattttaatatttttaaaacaagcaccctgacatttgtccgtcttgtacagatggctcccgatcccgccctgtggtgtccactgtgactagaacatatgcttgcaggctggtccttcgaggattctgaaaccttttccagagcatccttagttttcgagtagtccaaaagtcataactatccacaacagcttcttattggcatgactctcatcactccaaccgcaaaatcaaaccaaataatgccttataaaccacgcagctcagaggaagcagtgtgtcgccaggtcctggtgttgccactcagcttccagtgagcgagaagccatgtctcgcttccttttagcagtacagggacgtcattttgctgcctaatgtgtgtatatatatatatatttatatcccaaggtaaaggctagagtgggcgtggcccctcccatgccttccgcagggccccttttgtaactgaattcttttacaggtagccaatgctcttactgtttacagcatccccagcgccagtctttaccgctttccttcaacacctccaagttcccagctccatgctggtagccagggtaaagtcagctttatgagattttgatatcctcccatccctgtagactacggttgtatatagctcatgattatgaataagtttatttttacctcagaagtctccctccccaaactctactcagagtgtaagatttacatggaaaatacaacatatatttaaaaagaacaagaataaaaggaggctggagaaatagacccactggtaacatgcctgctaaggacatacacacagagctggatgtggtaacacacacttgttattccattactgggggagcagaggcaggcagatccctgtgactcactggccagccaagctattcaaggagcctcaggttccagaaagtggcattgtctcaaaatacaaggtggcaactcctgaggccacaacacccaaagttgacctctggcctcttacaggttcacgcatgacatgtgtgcacacatcccacacagggacatacacactcatacagaaacacatagcaaagagcagagcagctcttggagcatatctcaaatatcctgccccattggtaggagtctcagaatacccatcagcccaaaggaccttctctctgagcttcatctgagagcgcagatggctctgttgcctggtggcgtgtgcctgggatgcccagcagtaataggcagcgagttcagctgtcctgaatagacagagggccacgcaggctggggctgctctctgcacccttctttgaatctcaagggagaaaagtatgcttttgcttcttgtcaggccccaaatgctcccatccactggagaggggaggctgtagcagaggagggggaaatgggaggaaacagtccgatccctcactgtattcagaatagctgcagacagaagagaggggaaatgaaacaatggtgttgctttggagcactccgaccacaagaacattagcccaggccgggccatcaggggccaatggattaggagagtgttcagctgtgtgtctgcacacacctgactattgtttggagcaaatgtcctgcattagtgtcatgctttctcctgccagataggagaaactgagccagggtcaagtttccaaaatctctggggcagtgactcaaggccgtagttacagccacatcagcagacatgacggttctacgttgctggtttgttacggtggctctggaagtgtgcagaaaggtcagaagccacactactcttctcctagccatgcagagtaataatcattaaaaagctttcataactacgatgagggccatcaggaaggcagtcctgcctttggaatcagtgaattgttcacatacggtgtatgttcaccatgtattcacatggtgatgttctatactgctggcacaggaatttaaactattcaagagtgggggagatgtctctgtctgtagacatcctgctgcccaagcatgaggaccggaattcatatccccaggacctatataaaagtcaggcatgggggaagcatgtctgtaatcctagaagttgggtagaggcatctgccccaggaaggtcggtggccagccaacctagcaaaatttgcaagttgcaagctgcaggtttagtgagaataagatagagatagaccaaaaaagatacctgtagatggcctttgggcttcacatgcatgtgcacacatgtgccttgttcatatgcacacacacacacacacacacacacacccgtatatataatacataaatattttttacaaacttatttaagggcataaggaaggaacaagcagaaaccaaaaaatagcaagcaaggagcattctcagggatctggcctagcagctctcctcaagacctgtcacggagcctaccacctccaagttcaagtgggtacgttcggttcccaccagcagtgtacaggttaggcctttgactgtgaactcacgcatggagttgtccctgctatccttgcccacccccacattgcagactgtgaccctgccccatgtctctgcctgtattttatatttattggtgtctcctgctgcagattcattcctttgtacctaataaactttaataagtga

SEQ ID NO: 1039 - DNA, 4387 bp, Rattus norvegicus
ggcacgagggggagccgggcatgggggccgccctccgggggggccggggccgccgccgccgccgccgcggcagcgactgaagccgcgcaacaaggaggggcggggagtggtcgccgccgtccccgggaggcgccggagctcgactgcactcgctgccagccagccgtcccgagccgctcgcagattccctgagaacacccggcaagtaccacgtgcctacaactgcttccccggtcacagctgtggggagcttggggtgcggcagacaaatttctgtattcagctgcccaggcagaggagaatgggggctccacagcttgaagaatgaagacacgacagaataaagactcgatgtcaatgaggagtggacggaagaaagaggcccccgggccccgggaagagctgagatcgaggggccgggcctcccctggaggggtcagcacgtccagcagtgatggcaaagccgagaaatccaggcagacagccaagaaggcccgagtagaggagacctctaccccaaaagccaacaagcagggccggagcgaggagatctcagagagtgagagcgaagagaccagtgcgcccaaaaagaccaagaccgaggagcttccgcgcccacagtctccctcggatctggacagcttagatggccgcagcatcaatgatgacggcagcagtgaccctagagatatagaccaggacaaccgaagcacatcccccagcatctacagccctggcagtgtggaaaatgactcggattcatcctctggcctgtcccagggcccggctcgcccctaccacccacctccactctttcctccttcccctccaccaccagacagcattccccgacagccagagtctggctttgaaccgcacccttctgtgccgcctactggatatcatgctccaatggagccccccacatctcggttattccagggcccacctcctggagctcctcccccacacccacagctctaccctgggagtgctggtggaggtgttttatctggaccccccatgggtcccaaagggggagcagccgcctcctcagtgggtccccctagtgggggcaagcagcaccccccacccactaccccaattccaatatcaagctctggggccagtggcgctcctccagcaaagccccccaatactccagtgggtgctgggaacttaccttctgctccaccaccagctactttcccccacgtgacaccaaacctgcctcctccacctgccctgagacccctcaacaatgcctcagcctctcctcctggcatgggggctcagccaatccctgggcatctgccctctccccatgccatggggcagggtatgagtggacttcctcctggcccagagaagggcccaaccctggccccctctccccaccctttacccccggcttcttcctccgctcctgggcccccaatgcggtacccgtattcatcctgctccagtagctctgttgcagcgtcttctagttcctccgccgccacctcccagtacccagcttcccagaccctgcccagttaccctcactccttccccccaccaacaagtatgtctgtctctaatcagccacccaagtacacccagccttctctcccatcccaggctgtgtggagccagggcccacctcctcctcctcctccttatggccgcctcttgcccaacaacaacactcatccgggccctttccctcctaccgggggtcaatccacagcccacccgccagcccctgcacatcaccatcaccagcagcagcagcagccacagccacagccacagccgcaacaacatcatcatggaaactctgggccccctccacctggggcatatcctcaccccctagagagcagtaactcccaccatgcacacccttacaacatgtcaccctccctggggtctttgaggccctacccaccagggccagcacacctgcctccgtctcatggccaggtgtcttatagccaagcaggtcccaatggtcccccggtttcttcttcttccaactcttccgggtcttcgtctcaagccgcctattcatgctcacacccttcttcatcccagggcccccaaggggcatcctaccccttcccaccagttcctccaatcaccacctcctcagctactctttccactgtcatcgccaccgtggcttcctcgccagcaggttataagacagcctcaccacctggcccccctcagtacagcaagagagccccatccccagggtcctacaagacagccaccccgcctggatacaagccagggtcaccaccgtccttcagaacagggaccccacctggctatcgaggcacctctccgccagcaggcccagggaccttcaagccaggttcacccaccgtggggccggggcccctaccacccgcggggccttcaagtttgtcatctctgcctccaccacccgcggccccgactacagggccgcccctgactgccacgcagatcaaacaggaaccagctgaagagtatgaaacccccgagagtccggtgcctccggctcgcagcccctcgccccctcctaaggtggtggacgtgcctagccatgccagccagtcagccaggttcaataagcacctggaccgtggcttcaactcgtgcgcgcgcagcgacctgtactttgtgccgctggagggatccaagctggccaagaagcgcgcggacctggtggagaaagtgcggcgcgaggccgagcagcgcgcgcgcgaagaaaaagagcgcgagcgcgagcgggaacgtgagaaggagcgcgagcgcgagaaagagcgcgagctggagcgcagtgtgaaattggcccaggagggccgtgctccagtggagtgcccgtccctgggtccagtgccccatcggcctccctttgaacctggcagcgctgtggctaccgtgcccccttacctgggtcctgatactccagccctgcgcactctcagtgaatacgcccgacctcatgtcatgtctcctggcaatcgcaaccacccattctatgtgcccttgggggcagtggacccggggcttctgggttacaatgtcccagccctgtacagcagcgacccagctgcccgagaacgggagcgggaagcccgtgaacgtgacctccgtgaccggctcaagcctggctttgaggtgaaacctagtgagctggaacccctacatggggtccccgggccaggcctggatcccttcccccgacacgggggcctggctctacaacctgggccacctggcctgcatcctttcccttttcatccgagcctggggcccctggaacgagaacggctagcgctggcagctgggccagccctgcgtcctgacatgtcttatgctgagcggttggcagctgaaaggcagcatgcagaaagggtggcagccctgggcaatgacccactagcccggctgcagatgctcaacgtgactccccatcatcaccagcactcccacatccactctcacctacacctgcaccagcaggatgccatccatgcggcctccgcctcggtgcaccctctcattgaccccctggcctcagggtctcaccttacccggatcccctacccagctgggaccctccctaatccccttcttcctcaccctctgcacgagaacgaagttcttcgtcaccagctctttgctgccccttaccgggacctaccggcctctctatctgcgccaatgtcagccgcccatcagctgcaggccatgcacgcacagtcagccgagctgcagcgcttggcactggaacagcaacagtggctgcacgctcatcacccattgcacagcgtgccgctgcctgcccaggaggactactacagtcacctgaagaaggagagtgacaagccgctgtagaacctgccatccagacagcacccactgctccttcatccagaccttggaggaccacccccgaccttttgaccccatcccacccccaagccgaggacagggtgctgcccacttgcagagcttctgcagccgggcagagggagggagggaagaagggacagacaaggtcagggcccggggaagtggcaagggtggggacagaaagtggacagtatcttggaccaggtccctcctcccatcccctgcttttcttctgtatgcccaatccttggtggccactgctcctcccctaacccgttggtgtgatttttttcatctgttagatgtggctgttttgcgtagcattgtgtgctgcccctgccccatccctgtgtgtgcaccccctcggcgatatgtgccccttgcccgtcccacattaataatttatatatataaatatctatatgatgctctttaaaaacatcctgaccaaaacatcccaacaaaaacatcctcacggtgccccaaaaaaaaa

SEQ ID NO: 1040 - DNA, 1226 bp, Rattus norvegicus
ttttttttcttctcgaattttcaaccgtagctaccaaaactgaatatttggcaaaagtaagctgaagcaacagttgattgttccaaaggagaatctcccaccaaggagcaacattaagaaatgaaaagggaaactttcatcttgggcctgttggctcttctttcatattttacgcctggagaaagtcatcacttccagccaaaaccacatccataccaaaggctacagcaacccatttaccacagacgacattcacaagtctcttctatttacccaagatatggtcaatatccacgttatttctatgtttcacagaaacagcaagctcaaaaacctcaaattttaccaattcaaactccatggcaacgcgtctgccctccaggatatactgcgaggctgctccattaccattattctaggtttctatgcattcctaataaacagttaacctctgacaaaatagaaacaaaagtcactacaccagcacagaccaccaagcctaccacagattcaaccacaccagcaccgaccaccaagcctaccacagattcaaccacaccagcaccaaccaccaagcctaccacagattcaaccacaccagcaccgaccaccaagcctaccacagattcaaccacaccagcaccgaccaacaagcctaccacagattcaaccacaccagcaccgaccaacaagcctaccacagattcaaccacaccagcaccgaccaccaagcctaccacagattcaaccacaccagcaccgaccaccaagcctaccacagattcaaccacaccagcaccaaccaccaagcctaccacagattcaaccacaccagcaccgaccaccaagcctaccacagattcaaccacaccagcaccgaccaccaagcctaccacagattcaaccacaccagcaccgaccacaaaaatacctactacacctaagcctagcacctcaacagccatacctacatcaactaactctgctaacagctcttcctctactactacatcaagtaccaccatccaaactacaactctgtcaccttttcaacagatgcttcagtggcttcagatgtactttggttaaagtaggatgggatgggatggtctccaaactgtcagaacagttttatctcttaggataaataagcctcaatgatgattttaaagaaatcaacctgatcttactagaaaatcaaacaaataaaaacaatttgagcaatg

SEQ ID NO: 1041 - DNA, 2490 bp, Rattus norvegicus
cccatcatacctctatcgcctgccccgccgaactgcaaccccgggctctcggcagcgccgctgtgccacgcatttccacgcgcccgcagctttgtcatggcctacttgtcccgggcaactgcaaccctggcccgccaggactgcagtaatggatgttcggcatcgtatgctgaagaagaagaattagaagcttcgaccgagtcgtatgatgaagaaggaggatcagaagcttcgacccagacgtttagggccaaagatctcattatcacaaaagccgatgtcttaaaaaagaagcccgaccccagctcgctggtctttggagcttcgttcactgaccacatgctgatggtggagtggacctccaagtatggatgggataagcctcacatcaagccttttgaaaacttgtccatacatcccgctgcctctgttttgcactatgctgtggaattgtttgaaggcttgaaggcttttcggggagttgataacaagatccgattgttccggccggacctcaacatgaaaagaatgtgccgatctgccgtgaggaccactctgccggagtttgacaaggaggagcttctgcaatgcgttcttcagctcatacagctcgaccgagagtgggtcccctactcaacctctgccagtctgtacatccgccccacattcatcgggattgagccatcgcttggagtcaagaagccttctaaagctctgctctttgtgattttgagccccgtgggatcttatttttctaatgggaccttttctccggtgtccctgtgggccaacccaaagttcgtcagatcctggaaaggtgggactggagacttcaagatgggctgcaactatggatcttcccttctggcgcagtgtgaggcggcagagaacggctgtcaccaggtcctgtggctgtacggcaaggaaaaccggataactgaagtgggcacgatgaatctcttcctctactggataaacaaagatggagaagaagaactggcgacgcctccgctagatggcgtcattctcccaggagtcactcggcagagcatcctggagctgggagaagagtggggcgagtttaaggtgtgcgagagacacatcaccatggatgacctgtccaccgccctggaggagaacagagtgaaggagatgttcggctcggggacagcctgcgttgtctgcccagttgccagtattctgtacaagggccagatgctgcacattccaaccatggagaatggccacaagctttcaagtcgcatcatggcaaagttgactgatatccagtatggacggatcaagagcgaatggacactggagttgccctaatgggagagctcagggtatcggtgacggggtgccacagaagaccgactcctgtcctcgagctgggacaacctgtgactattttaactccttgtagttccattgttcattgttaccaaacgagtttgtgtccccccccccccccgtgagccaagaaaattgccagtgttaagtgtcacctgtgaacatgatagtagctgctttactgtacctttccttggaaagctatcaatgaataattgcctcccctcactccataccagatccttagtaggagaatgggttcccccaccaatgagatgactgtgtgctggaagggctactgaggaaatgccataggcggcctccctgtgactcatgggcaccctcagagcgggagccctttgttacttttgctggctggtaaggttctgttgtttacgtttttgtttgtttgtttctaattggggaagatttgggctccctgtgaagccctgctggcctggtattccgtgatgtctgcccaggctggtctcagactcggagcgggtcttcctgtctcacacagccttctggatgctggggcgatggacaggtgtgataccttgatttgtttctgtcttttaaacaaaagtttggtcggctggatttcgtttctccgcgcttctgtaagtccctgagtccgcgctaaggtgaccgtgccccttcttggtatcatggcctgcactaatgtcaccgaaggtgtctgtgaggctcactgccctttttctgtaactatacctggctgctcactgcgctgctatgagactaggggtcctgtgccttctagatctttgtatcctcaaagcccagcacatagtaagtattcagtacttgtttaccatgagaatgaacatagaagtgtactttctgtctctccatgctgaaaccctttcggaaaccacgcctgattcgggcagcatgtagcagtatttatcttaggctgtctttcttgtccctggactcctccagacagcatggaggaattctgttttaagattatcttggagtttaagtgattgccctggaaaaatgaaatgtaccaaccatgtggaaatgacagctactgtacattatgtatgaaatgccaaataaagggacaagttgggagataaaaaaaaaaaaaaaaaaaaaaaaaaaagg

SEQ ID NO: 1042 - DNA, 2246 bp, Rattus norvegicus
ggcaggagtcggatgtagatcgctcctgagttcaattcccagcaaccacacctagccgggaagacggacacgcgtcggctcccctgcacgcaaagcagctttggatcgcctgcagggcaagaagactggaagcatgagttcagacagcagccaagcggtgatcaccacccctcctcctcccagcatgcctcacaaagagaggtattttgaccgaatcaatgaaagtgatccagaatacctccgagagaggaacatgtctcctgatctacgggaggacttcaatatgatggagcagaggaagcgagtcactcagatcctgcagagtcctgcctttcgggaagacctagagtgcctcacccaagaacagatgaagaaaggccacgacccgaccggattgctagcgttacagcagatcgccgactacatcatggccaactccttcaccggtttttcttcacctcccctgagtcttggcatggtcactcctattaatgaccttcctggtgcagacacatcctcgtatgtgaagggagagaagctcactcgttgcgaactcgccagcctgtacagactcgcagatctgtttgggtgggcacatctggcaaatacatacatctcggtacgagtaagtaaggagcaggaccacatcataatcatccccagaggcctccctttctctgaagccacagcctctgctctggtgaaggtcaacataataggagaagtggtggaccaggggagtactaatttgaaaattgaccattcaggattcagtccccatgctgcaatctattcaacccgtcccgatgtgaagtgtgtgatacacatccacaccctcgctacagcagctgtgtcttccatgaagtgtgggatccttccaatttcccaagagtctctcatcctgggagatgtagcctattatgactaccaggggtcgcttgatgaggaggaggaaagaatcgaacttcagaaagttctgggtccaagctgtaaggtgctggtcctcaggaaccatggcgtggtagctcttggagaaacacttgaggaggctttccactacatcttcaatgtacagatggcctgtgagattcaggtgcaggctgtagcaggggcagggggagtggacaatcttctcatactggatcttcagaaatacaaagctttcacccacggtgttgccatgactggaggaggcggtgtgaatatgggttcccatcagaagtggaaagttggcgagattgagtttgaagggctcatgagaaccctggacaacttgggctacagaacaggctacgcatacaggcatcctctagttcgagagaagcctcggcacaagagtgacgtggagatcccagcaactgtgactgcattctcctttgaagatgatagtgtgccactctctcccctcaagtacatggcacagagacagcagcgtgaaaaaacaagatggctgaattctccaaatacatacatgaaagtgaatgtgccggaggagtcccggaacggggaaactagtcccaggaccaaaataacgtggatgaaagcagaggacccctctaaagttagtagtggaacacctatcaaaattgaagatcccaatcagtttgttcctctaaacacgaacccgactgaggtgctggagaagagaaataagattcgggaacagaatcgctatgacctgaagacagcagggccacagtctcagctgctggcggggatcgttgtggacaaaccgccttctaccatgcggtttgaagacgatgatcagggcccaccagcccctcctaacccattcagtcatctcatggaaggagaacttgaagaatatacgaagacaatcgagagacagcagcaaggcctggacgaaaaccacgagctgttttccaagagcttcacctctgtggatgtgcctgtcattgtgaatggcaaggacgagatgcacgatgttgaagacgagctcgctcagcgcgtcagcaggctcacgacgagcaccaccatagagaacatcgagatcaccatcaagtccccagacagaactgaagaggtcctgtcacccgatggctcgccttcaaagtcaccatccaagaaaaagaagaaattccgcacaccttcttttctcaaaaagaacaaaaaaaaaggagaaagttgaggcctaagtagtctttctgtaatttgtacattacattgtggcattgcacagttaaataccatattttagttaatcgttaatatacggtggtagagcc

SEQ ID NO: 1043 - DNA, 3111 bp, Rattus norvegicus
gttggccaccatggggatgtaccaagtgagactgtagggaaagaaggtggtgactcgcgtgcctggctactggctgctgctcacctcgatgctacaagattcctagcaagatcaaaactgaccattaacctacctctacatccccctggcgccgttccagggccaacgccacattccctgctgggcacgcaatggccgcaccccctcccgctacagaaggctcttttggtacacgcagtccgaggtcgccatggatcggatgaagaagatcaaacggcagctgtcaatgacactccgagggggccgaggcatagacaagaccaatggtgtccctgagcagataggcctagatgagagtggtggtggtggtggcatgacccttggagaagctcccacccgtgttgcccctggggaacttcgctctattcggggcccactcagctctgcaccaggtctacctgggtttcccagtctgctctaggggccatgtacacaaatggatacgatgaagaaatatattatattgggggaaagagagtgttcttgactccaaaggcctggcctttccctcactctgcaccagagattgtgcatgaagacatgaagatgggatctgatggggagagtgaccaggcttcagccacatcctcagatgaggtgcagtctccagtgagagtgcgcatgcgcaaccaccccccacgcaagatctccactgaggatatcaacaaatgcctgtcactaccagctgacatacggctgcctgagggctaccttgagaagctgaccctcaatagccccatcggtgataagcctcttagccggcgcctccggccagtcagcttgtctgagattggctttggaaaactggagacctacatcaaactagacaagctgggtgagggtacctatgccactgtctacaaaggcaaaagcaagctcacagacaaccttgtagcacttaaggagatcagactggaacacgaagaaggggcaccctgcactgctatccgggaagtatccctgcttaaggacctcaagcatgccaacatcgtcacactacatgacattatccacacagagaagtccctcacccttgtctttgaatacttggacaaggacctgaagcagtacctggatgactgtggaaatgtcatcaacatgcacaatgtgaaactgttcctgttccagttgctccgtggcctggcctactgccacaggcagaaggtgctacaccgagacctcaagccccagaacctactcatcaacgagaggggagagctcaaactggcagactttggcctggcttacgccaagtcaattcctactaaaacatactccaacgaagtggtgacactgtggtaccggccccctgacatcttacttgggtccacagactactccggccaaattgacatgtggggtgttggctgcatcttttatgagatggccacaggccggcccctcttcccaggctccacagtggaagaacagctgcacttcatcttccgcattttgggaaccccaactgaggacacatggccaggtatcctgtccaatgaagagtttagaacatacaactaccccaagtaccgagccgaggcccttctgaggcatgcaccccgacttgaatgcgatggagctgacctcctcaccaagctgctgcagtttgagggtcgcaatcggatctctgctgaggatgccatgaaacatccattctttctcagcttgggggagcggatccacaaacttcctgacactacttccatatttgcactaaaggaggtacagctacaaaaggaggccaacattcggtccacttctatgcctgactcaggcaggccagctttccgtgtggtggataccgagttctaagccaagttttaagccacagacagaccaaggccccagcaggcagcggctggagggatgccacacccctcacaggacagcccccatctgcaatcctccctgcttgttgcctgcttacctgcctgagccacactcccctgccaacttgtcccctgccacctgtccaaacaccgaactactggcctggcctgtcaacccaaccactggcctgtctgctgggtgctaacaaagctctcaccactactttgcttgatgtgtctgtctctgtcttggtagatgctggtggaccgaatggccgtgccagctttccacactaaggctaggccttcccctcttcatcacactctctcccaggaccactaccccatggccagccaggggtttggagctagcccaggccaggctcttaatcgactttgactagaaggtagtgagtgatgccttgggtctgagcatcatttgcctgcttcccacctgtcccacttgcctctgttgtatgggcttttttttagtttcttttattgtttttttattattttaaatgaggttctcactttttaatgcaatatctctgtatacagactggttgggcactactccctgagtgtggcactcccacagtattttgtgcaatgaagtcccactcccaccctttgagaggtagggacccagaccctattcagatcctcaccatcactagaccctggaattggctatgggaaagcatgcctcagccactcaccttcctcccctacctagcgttcccagctatagggggacctgagaactaccagagagtgggagatggacatggtggggcctactttttccctccttcagtcccgtagccagggcctccttccttctcagggtcttccccagcccagctctgcctagccctcctgccctgtcctactcggtgctgttgagtaggggctctgcctggaatcgagcagcttagtgaggagccatatataatatgtgcacaagcaggaggacatgtgggagcttgtgcccaattgttacaccccaatccctaggagggtcaggcaggccaaggacagtctcctggatggatggtttgctccccttactccaccttaagccttgggacccttaagcagggtgggagggcaagggagggtgccctcctagtggggtttggggggattgggttcctgaatgcaccataatcgctgtatgaaatattaaaaaaaagtctaaagtgaaaaaaaaaaaaaa

SEQ ID NO: 1044 - DNA, 2646 bp, Rattus norvegicus
cacgaataagcctctggaggagctgctgaatcacccccgccccaggctgtcttctgaagctgtctggggatagctttgctaatcaactgactggaaataattccagacaccacatcaaggatacagctcatgttttgtttgggacttccacgttgagtcatggaggagtcttcagtgacaattggcacaatagacgtttcttatctgcccaattcatcagaatacagccttggccgatgtaaacacacgaatgaggactgggttgactgtggcttcaaacctaccttcttcagatccgcaacgctgaaatggaaggagagcctcatgagccggaagaggcccttcgtgggaaggtgttgctattcatgcacgcctcagagctgggaaaggtttttcaaccccagtatcccatctctgggtttgcggaatgttatttatatcaatgaaactcacacaaggcaccgaggatggctggcaagacggctttcttacatcctttttgttcaagagcgcgatgtccacaagggcatgtttgccaccagtatcactgacaatgtactgaatagcagcagagtccaagaggcaattgctgaagtggctgcagaattgaacccggatggatctgcccagcagcagtccaaagccatccagaaagtgaaaaggaaagccaggaagatcctccaggaaatggttgctacagtctcccccgggatgatcaggctgactggctgggtgttactaaagctcttcaacagcttcttctggaacattcagattcacaagggtcaacttgagatggtgaaagctgcaactgagacgaatctgccgctcttgtttctgccggtgcacagatcccacatcgactacctgctgctcaccttcatcctcttctgccacaacatcaaagctccatacatcgcctcgggcaacaacctcaacatccccatcttcagtaccttgattcacaagcttgggggctttttcataagacggaggcttgacgaaactccagatggacgcaaagacattctgtacagagcgttgctccatgggcatatagttgaactcctccgacagcagcagttcctggagatcttcctggaaggcacccgctcccgcagtggcaagacctcctgtgcccgggccgggctcctgtcagtggtagtggatactctgtcatccaacaccatccctgacatcctggtcatccctgtgggcatctcgtatgatcggataatcgaaggtcactacaatggtgaacagttgggcaagcccaagaagaatgaaagtctctggagtgtggcaagaggcgttatcagaatgctgcggaaaaactacggctatgtccgagtggactttgcacagccattttctttgaaggaatatttagaaggccaaagtcagaaacctgtatctgctcccctctctttggagcaagcactgttaccagcaatccttccttcaagacctgatgctgctgctgccgaacatgaagacatgtccagtaatgagtcgagaaacgcggcagacgaagccttccgaaggaggctgatcgcaaacctggcggagcacattctcttcaccgccagcaagtcctgcgctatcatgtccacccacattgtggcctgcctgctcctctacagacacaggcagggaatccacctctccacgctggtggaagacttctttgtgatgaaggaggaagtcctagctcgggattttgacctgggcttctccgggaattcagaagatgtagtcatgcatgctattcagcttctggggaactgtgtcacaatcacccacactagcaggaaggatgaattctttattactcccagcacaactgtcccgtccgtctttgaactcaacttctacagcaatggggtacttcatgtctttatcatggaagccatcatagcttgcagcatttatgcagtccagaataagaggggttccggagggtctgccggaggccttggcaacctgatcagccaggagcagctggtgcggaaggccgccagcctgtgctaccttctctctaatgaaggtaccatttctctgccctgccagacattttaccaggtttgtcaagagacagtaggaaagttcatccagtacggaattctcacagtggcagagcaagatgaccaggaagatgtcagtcctggccttgcagagcagcagtggaacaagaagcttccggagcctctgaactggagaagtgacgaagaagatgaggacagtgactttggtgaggagcagcgtgattgctacctgaaggtgagccaggccaaggagcaccagcaattcatcacctttctgcagaggcttctggggcccctgctagaagcctacagctctgctgccatctttgtccacaccttccgcggcccagtcccggagtctgagtacctgcagaagctgcacaggtaccttctcaccaggacggagaggaacgtcgcggtgtacgctgagagtgccacatactgtcttgtgaagaatgctgtgaaaatgtttaaggacatcggggttttcaaagagaccaagcagaagcgagcgtctgtcttagaactgagcaccactttcctacctcagggcagccggcagaagctcctggaatacattctgagcttcgtggtgctgtag

SEQ ID NO: 1045 - DNA, 2858 bp, Rattus norvegicus
gaattcggcacgagcggaactgtgaagggctcccatcaggctcccgactgacagagagctagaaggcacagagaaacctgaggattctcatttaactctgggaactgcttcaagaagctatagtaccagagaacacctgggaagtgtgagaattcctgcagctgggaccaaaatgtctttcatagatccttatcagcacataatagtggaacaccagtattcccataagtttacagtagtggttctacgtgccaccaaagtaaccaaggggacctttggcgatatgctggacactcctgatccttatgtggaacttttcatctctacaacccctgacagcaggaagcgaacaagacacttcaataatgatataaaccctgtgtggaatgagacctttgagttcattttggatcctaatcaggaaaatgttttggagatcacattgatggatgccaattacgtcatggatgaaaccctaggcacagctacatttcctgtatcttctatgaaggtgggagagaagaaagaagtcccttttattttcaaccaagtcacagaaatgattctggaaatgtctcttgaagtttcgtcatgcccagacctacggttcagcatggcactgtgtgatcaggagaaaacattcaggcagcagaggaaagagaacataaaagagaacatgaagaaacttttgggtccaaaaaagagcgaggggctttattccacacgtgatgtgcctgtggtggccattttgggttccggcgggggtttccgggccatggtgggattctccggtgtgatgaaggcgctctatgaatcagggattttggattgtgcgacctacgttgctggtctgtccggctccacatggtacatgtcaaccttgtactcccaccctgattttccagagaaaggtcctgaggagattaatgaagagctaatgaaaaatgttagccacaaccctctcttacttcttacgccacagaaagttaaaagatatgttgagtctttatggaagaagaaaagttctggccttcctgtcacctttactgacatctttggaatgttaataggagaaacactaattcaaaatagaatagtaccgaccttgagtagcttgaaggaaaaggtcagcgccgcccggtgtcctctgcctctcttcacctgtctccatgtcaaaccggacgtgtcagagctgatgtttgccgattgggtagaatttagtccatacgaaattggcatggcaaaatatggtacctttatgactcctgacctgtttggaagcaaattttttatgggaacagttgtaaaaaaatatgaagaaaaccccttgcatttcttaatgggtgtctggggcagtgccttttctatactgttcaacagagttttgggagtttctggcttacagaataaaggttctacaatggaggaggaattagaaaatattacagcaaagcacattgtgagtaacgacagctctgacagcgatgacgaggcccaaggacccaaaggcaccgagaatgaagatgcggaaagagagtaccaaaatgacaaccaagcaagttgggtccatcggatgctaatggccttggtgagtgactcagctttattcaatacccgagaaggacgtgctgggaaggtgcataacttcatgttgggcttgaatctcaacacatcgtatccactgtctcccctgagagacttcagcccccaagattccttcgatgatgatgaactcgacgcagcggtagcagatccagatgaatttgaacgaatatatgaaccactggatgtcaaaagtaaaaagattcatgttgtagacagtgggctcacgtttaacctgccgtatcccttgattctgcgacctcagagaggtgtggatctcatcatttcctttgacttttctgcaaggccaagtgacaccagccctccattcaaggaacttctgcttgcagagaagtgggctaaaatgaacaagctcccttttccaaagattgatccttacgtgtttgatcgggaaggattgaaggaatgctatgtgtttaaacctaagaatcctgatgtggagaaggattgcacaaccattatccactttgttctggccaacatcaacttcagaaagtacaaggccccaggtgttctgagggaaaccaaggaagagaaagaaatagctgactttgacattttcgatgaccccgaatcgccattttcaaccttcaacttccagtatccaaatcaagcattcaaaaggctacatgatctgatgtacttcaacacactgaacaacattgatgtgataaaggatgccattgttgagagcattgaatacagaagacagaacccatctcgttgctctgtttccctcagtaatgttgaggcaagaaaattcttcaacaaggagttcctaagtaaacccacagcagagtccatttgaattccatgactactggagttcagagcacatgagagatcatcttactatgcacaagagactgactgctactcagagttgtggggacggaggcgtgtgttaggtgaaaacggtgttgattatgcaatacttggcaacagtttctgacagtatgaattttttgacataagcatagggctatatactgtattttaaacattcctcacatttttacctgagcatttttatatatatataaaaatatcctttccttttataaatattaatagtttaactcagtaaaaaaaagcttcccattgtgtgtgaatgttattctgaactagatttgttcatgccatgttacaacactatttttatttaaatgttcatatctacacatgcgaaataaatactttgatatacaaattgccaaaaaaaaaaaaaaaaaaaa

SEQ ID NO: 1046 - DNA, 4470 bp, Rattus norvegicus
gggccgggcggaggttcgcgggcggcgctaggccgggcgaagcggcatgagccggcccccgccgacggggaaaatgcccggcgcccccgaggccgcggccggggacggggcgggcgcgggtcgtcagaggaagctggaggcgctcatccgagaccctcgctcgcccatcaacgtggaaagcctgctggatggcttaaattccttggtccttgatttggattttcctgctttgaggaaaaataaaaatatagataatttcctaaatagatatgagaaaattgtgaaaaaaatcagaggtttacagatgaaagcagaagactatgatgttgtaaaagttattggaagaggtgcttttggtgaagttcagttggttcgtcataaggcatcacagaaggtttatgcaatgaagcttcttagtaaatttgaaatgataaaaagatcagattctgcttttttctgggaagaaagagatattatggcttttgctaacagtccgtgggtggttcagctcttttgtgcctttcaagatgacaggtatctgtacatggtgatggagtacatgccaggtggagaccttgttaacctgatgagcaattatgatgtgcctgagaagtgggccaagttttatactgctgaagtcgtgcttgcactggatgcaatacactccatgggcttaatacacagagatgtgaagcccgataacatgctattggataaacacggacatctaaaattagcagattttggcacatgtatgaaaatggatgaaacaggcatggtgcattgtgatacagcagttggaactccagactacatatcacctgaggttctgaaatcacaaggaggtgatggttactatggacgagaatgtgattggtggtctgtaggtgttttcctttttgagatgttagtaggggacactccattttatgcagattcacttgtaggaacctacagcaaaattatggatcataaaaattcactgtgttttcctgaagatacagaaatttctaaacatgcgaagaatctcatatgtgccttcttaacagacagggaggtacgacttggaagaaatggggtagaagaaatcaaatcagcatccttctttaagaatgatcagtggaattgggataacataagagagacggcagctccagtggtgcctgagctcagcagtgacatagacagcagcaactttgatgacattgaggatgacaaaggcgatgtagagaccttcccgattcctaaagcttttgtgggaaatcagctgccttttataggatttacctactttagagaaaatttgttactaagtgattctccaccttgtagagaaaatgatgcaatacaaacaaggaaaagtgaagaaagtcaggagattcagaaaaaattatatgcactagaagaacaccttagcagtgaggtacaagccaaggaggaactggaacagaagtgcaagtctattaatactcgtctagagaaaacagcaaaggaactagaagaagagattacctttaggaaaaatgtggaatcaacattaagacagctagaaagagaaaaggcccttcttcagcacaaaaatgcagaatatcaacggaaagctgatcatgaagctgacaagaaacggaatttggaaaatgatgttaacagcttaaaagatcaacttgaagatttgaagaaaagaaaccagagctctcagatatccactgagaaggtcaatcagctccagaaacaactggatgaagctaatgctttgctaagaacagagtctgatactgcagcacggttaagaaaaacccaggcagaaagttccaaacagattcagcagctggaatctaacaatagagatctacaagataaaaactgcctgcttgaaactgccaagttaaaacttgagaaggaatttatcaatcttcagtcagctctagaatctgaaagaagggaccggacccatggatcagagataattaatgatttacaaggtagaatatctgggttggaagaagatttgaagactggcaaaaccttactagcaaaagtagagctggagaagagacagctgcaggagaagctcactgacttagagaaggaaaagagcaacatggaaatagatatgacatatcaactgaaagttatacagcagagtttagaacaagaagaagctgaacacaagaccacaaaagcacgactagcggataaaaataagatctatgaatccattgaagaagctaaatcagaagccatgaaagaaatggagaagaagctgttggaagagaggtctttaaagcagaaagtggagaacctactcctggaagccgagaagagatgttctatattggattgtgacctcaaacagtctcagcagaaactgaatgagctgctgaagcagaaagatgtgctgaatgaggatgttagaaatttgacattaaaaatagagcaggaaactcagaagcgttgtcttatgcaaaatgacctgaagatgcagacccagcaagttaacaccctaaaaatgtcagaaaagcaaataaaacaagaaaataatcatcttatggaaatgaaaatgaacttggaaaagcaaaatgctgaacttcgaaaagagcggcaggatgcagatgggcagatgaaggaactgcaagaccaacttgaagcagagcagtatttctcaaccctctataaaacacaagttagagaacttaaagaagaaaatgaagagaaaactaaactttgtaaagagttgcagcagaaaaagcaggatttacaggatgaaagagactccttggctgcccagctggagatcaccctcaccaaagcagactctgagcagctggctcgctccattgctgaggagcaatactctgacttggaaaaagagaagatcatgaaagagctggaaatcaaagagatgatggctagacacaaacaagagcttactgaaaaggacgctacaattgcatcccttgaagaaacaaatagaacactaactagtgatgttgcaaatcttgcaaacgagaaagaagaactaaacaacaagttgaaagatacccaagaacaactgtcaaagttgaaagatgaagagatcagtgcagcggctattaaagcacagtttgagaagcagctgctgactgagcgaacactcaagactcaagctgtgaataagttggcagagatcatgaatcgaaaagaacctgtcaagcgtggtagtgacacagatgtgcgaagaaaagaaaaggaaaacagaaaattacatatggagcttaagtctgaacgtgaaaaattgacacaacagatgatcaaatatcagaaagaactgaatgaaatgcaggctcaaatagctgaagagagccaaattcgaatagaactgcagatgaccctggacagtaaagacagtgacattgaacagcttcggtcgcagctccaggccttgcatattggtatggacagttccagtataggcagtggaccaggggatgctgagcctgatgacggatttccagaatcacgattagaaggatggctgtcgttgcctgtgcggaacaacactaaaaagtttggatgggttaagaagtatgtgattgtaagcagcaagaagattcttttctatgatagtgaacaagataaagagcagtctaacccttacatggtgttagacatagacaagctatttcatgtccgacctgttactcagacagatgtatacagagcagatgctaaagaaattccaaggatatttcagatcctgtatgccaatgaaggagaaagtaaaaaggaaccagaatttccagtggaaccagtgggagaaaaatctaattatatttgccacaaaggacatgagtttattcctactctttatcacttcccaaccaactgtgaggcctgtatgaagccactgtggcacatgtttaaacctcctcctgctctagagtgcagtagatgccacattaaatgtcataaagatcacatggacaaaaaggaagagatcatagccccctgcaaagtttattatgatatatcatcggcaaagaatctgttgttattagcaaattcaacggaagaacagcagaaatgggttagtcggttggtgaaaaagatacctaaaaagcctccagctccagacccttttgcccgatcatcccctagaacctcaatgaaaatacaacaaaaccagtccattcggcggcccagtcgacagcttgctccaaacaaaccaagctaacttgccttctatgaaagcagttattgaaggtgatcatattcttccatccacaagactgaaatatggtttctcaaaacttaactaaaaagctatatttttactgagacacatacatacaccacatgtcgctcgttgcgtgcatgcttgcagtcccttcccccctgaaataattacaaatcatggagaggtttgtctgggctactttgaacagttgaacaaacaatggttggtgaggtaaaaaaagtgtcctacaattc

SEQ ID NO: 1047 - DNA, 942 bp, Rattus norvegicus
gcctgcaggtcggctctagagacagacacaacggtaacattatgatcgataacgaaggccatgtaagtcacatcgattttggatttatgctatcaaattcacccggctcagtgggctttgaggccgcaccattcaaattaacttacgaatatattgaactgctaggcggagtagagggagaagcgtttaaaaagtttgttgaactaactaaaagttcgttcaaggctctgagaaagtatgctgatcaaatcgtatcaatgtgtgagattatgcaaaaggacaatatgcagccttgtttcgatgctggcgaacaaacaagtgtacaactacgacaaaggttccaattggacttatcagaaaaagaagttgatgacttcgtagaaaatttcttgataggtaaatctttgggtagtatttacaccagaatatacgaccaatttcaacttattacacagggtatatatagctgacaaaaaaattggaattttagtaaaaggaatatacatatatttatttattgccgagaataatagagcagctgactcagaaaaagcaaggtaaaagaatgagagtaaaataaatatgtggttaattaaccatacatataaattattatcttattttctgcgtaaagcgtcaaaccgtttcttcaactcatctagttcatcattttcttgctccttcttagtctttctttttgtagttttcttttctgattgttcttttcgatcacttcctttttgatatctttcggaatcttgagctcgttcttgatattttcactattctgcctaggctttttaacagtgatagggtgtttagcatctgcattgtcattatcgtcattatctaaggctaaaataggcttttcttgtcattatcctcgatatctccgaggggtcactaaagtctgaagaaatgttagaagacgacgaagataag

SEQ ID NO: 1048 - DNA, 1334 bp, Rattus norvegicus
caggtgaagctgcaggagtcaggacctggcctggtggcgccctcacagagcctgtccatcacttgcactgtttctgggttttcattgaccagctatggtgtacactgggttcgccagcctccaggaaagggtctggaatggctgggagttatatgggctggtggaaacacaaattataattcggctcacatgtccagagtgagtttcagtaaagacaattccaagagccaagttttcttaaaaatgaacagtctgcaaactgatgacacagccctgtactactgtgccagagatcatggggtttactggggccaagggactctggtcacagtctctgcagccaaaacgacacccccatctgtctatccactggcctctggatctgctgcccaaactaactccatggtgaccctgggatgcctggtcaagggctatttccctgagccagtgacagtgacctggaactctggatccctgtccagcggtgtgcacaccttcccagctgtcctgcagtctgacctctacactctgagcagctcagtgactgtcccctccagcacctggcccagcgagaccgtcacctgcaacgttgcccacccggccagcagcaccaaggtggacaagaaaattgtgcccagggattgtggttgtaagccttgcatatgtacagtcccagaagtatcatctgtcttcatcttccccccaaagcccaaggatgtgctcaccattactctgactcctaaggtcacgtgtgttgtggtagacatcagcaaggatgatcccgaggtccagttcagctggtttgtagatgatgtggaggtgcacacagctcagacgcaaccccgggaggagcagttcaacagcactttccgctcagtcagtgaacttcccatcatgcaccaggactggctcaatggcaaggagttcaaatgcagggtcaacagtgcagctttccctgcccccatcgagaaaaccatctccaaaaccaaaggcagaccgaaggctccacaggtgtacaccattccacctcccaaggagcagatggccaaggataaagtcagtctgacctgcatgataacagacttcttccctgaagacattactgtggagtggcagtggaatgggcagccagcggagaactacaagaacactcagcccatcatggactcagatggctcttacttcgtctacagcaagctcaatgtgcagaagagcaactgggaggcaggaaatactttcacctgctctgtgttacatgagggcctgcacaaccaccatactgagaagagcctctcccactctcctggtaaatgatcccagagtccagtggcccc

SEQ ID NO: 1049 - DNA, 2524 bp, Rattus norvegicus
ccctagtttccctccccgggccgcaggagaaacagtgccctctcccttcttgacccctggcccttccctcccttattccctcttgccgccgctgcttctggcgctgccgctcccggaggagctcccgtcacggtgatggggtctcgggcctccacgttactgcgggacgaagagctcgaggagatcaagaaggagactggcttttcccacagtcagatcacacgcctgtacagccgcttcaccagcctggacaaaggggagaacggaactctcagccgggaagatttccagaggattccagaacttgccatcaacccactgggggaccggatcatcaatgccttcttctcagagggagaggatcaggtaaacttccgaggattcatgagaactttggctcatttccgacccattgaggataacgaaaagagcaaagatgtgaatggaccggaacccctcaacagccggagcaacaaactgcactttgctttcagactttatgacttggataaagatgacaagatctcccgcgatgagctgttacaggtactgcgaatgatggtcggagtgaatatctcagatgagcagctgggcagtattgcagacaggaccatccaggaggctgaccaagatggagacagtgccatatcttttacagaatttgttaaggttttggagaaggtggatgtagaacagaagatgagcatccgatttcttcactaaagggcagagaccaaattattcttgctttctagtatttaagaactgaaacttccttctgtcctccagccccaccccatcctgtcatccccctttcccagaatactacagctcctgcatgacaacctgaagtctctcctgtccatacaaacttgcctttggtgtataaacagggcgttacagaatggtaccctgtctatttctgttcggtatccacccatcagtctttattgtaagtaccaacttcccctgttctactgctcagtgccacgcatccgtcctgtctgaggaaagaaacagggactcatgtcaagaaccagccagcaaagctcccactagatgggaccatatccatgctgccttcccttcatcagccctccatcatggtcctgtgtgctgtgtcctgtgtcctgtgtctgtttcttcctacctctctgtcatccagccttctctccattcagtctttcagctgtcctcctgtcgttgagattccctgcattctacttgactctgggctctgctggtaagcctgtttctgatgtggcaggatagttagtggtctggtgatctgtatctaccttctgatgtgggatattgcctatccaggagctattgctctgtcgtcacagggcttatgagcagacatgttcttaaaaggtagtcatggtgaggcttgtagagccatgtctcctaggtggcttcccaggtctctctacctctgactttttattttcaaatatatttatgtggcttttctgggtacagtgttgacattcagaaaatagtctaatgcctgccagtttgcttctctttgggacattgtcaccacccaagcggctgttctgacaatatggtagagggccttcttgtgttttctgacaaggatgggcaccctggagagctgcccacatttgctccacagcatgggttatgcctcagtgttctgtacacttgaagattcttcacatttccaaacagaaagactagtgttacagaagtgcctgacttacctcagtcctaaagaattagattgtcctcagtgtcttaaagttttgcacaaaactctgaatgaattttatacttggcaaattttaatgctggaagatgtatagtcagttcataatcctggtccaggcactgtatgcatcgaatgtattgtctcatgagcttcctaatgacacgaccttcctagctccttgtgaatactatactatgcagatccctcagaagcatgggacctgggactggtggcaccaactgaggtgacattctctgccaatgtcagcttgatttagatgtcactgaatcaagctgcttccgccctgtgttcctgtgaatctgctcttggctggctttctctggtgttgcctgcttgcttgcttgctttgttgctttggaaggctatccaagatatgtaagcaattctttaggaaataaattgctgttaacccaaacaaacaaaaacactgcagacgagatgggtaaaggcgagcagtgggggcgtggctaggacagatggctagggtctacatgaactggggaattctttatgaaatatgtcagactttgtgatcaaatgatgtgatataagaattgtataaagggaataattgtctgatacttatctgtttgagaagtacttcagaagcatcttgatttaattatttaaagtttctaagattatgccccccttggctgtatagcaaactgtttttatccacagttgtgccttattgtcccattaaaattgtattcctcaatccaccaataaattaattgtcgttaaaacaaaaaaaaaaaaaaa

SEQ ID NO: 1050 - DNA, 1647 bp, Rattus norvegicus
atggccgagaagcagaagcacgacgggcgggtgaagatcggccactacatcctgggggacacgctgggcgtcggcaccttcgggaaagtgaaggtgggcaagcacgagttgactggacataaagttgctgtgaagatactcaaccggcagaagattcgaagcctggacgtggtcgggaaaatccgcagagagatccagaacctgaagcttttcaggcaccctcatataatcaaactgtaccaggtcatcagtacaccgtctgatattttcatggtcatggaatatgtctcaggaggagagctatttgattatatctgtaaaaatggaaggttggacgaaaaggagagtcgacgtctgttccagcagatcctttctggtgtggactattgtcacaggcatatggtggtccacagagatttgaaacctgaaaacgtcctgcttgatgcacacatgaatgcaaagatagccgacttcggtctttcaaacatgatgtcagatggtgaatttttaagaacgagctgtggctcgcccaattatgctgcaccagaagtaatttcaggaagattgtacgcaggccctgaagtagacatctggagcagcggggtcattctctatgctttgctgtgtggaactctcccttttgatgatgaccacgtgccaactctttttaagaagatatgtgacgggatattttatacccctcagtatttgaatccctctgtaataagccttttgaagcatatgctgcaggtagatcctatgaagagggccacaataaaagatatcagggaacatgaatggtttaagcaggaccttccaaaatatctctttcctgaagacccgtcttatagttcaaccatgattgatgatgaagccttaaaagaagtgtgtgagaagttcgagtgctcagaggaggaggtcctcagctgcctgtacaacagaaaccaccaggacccactggcagttgcctaccacctcataatagacaacaggagaataatgaacgaagccaaagatttctacttggcaacaagcccacccgattctttcctcgatgatcaccatttaactcggcctcaccctgagagagtaccattcttggttgccgaaacaccaagggcccgacacaccctagatgaattaaacccacagaaatccaaacaccaaggcgtacggaaggcaaagtggcatttggggattcgaagtcaaagccgacccaatgacatcatggcagaagtgtgtagagcaatcaagcagttggactatgaatggaaggttgtaaacccctattatttgcgtgtgcgaaggaagaaccctgtgacaagcacattttccaaaatgagtctacagctataccaagtggatagtaggacttacttattggatttccgaagtattgatgatgagattacagaagccaaatcagggactgctactccacagagatcgggatccatcagcaactatcgatcttgccaaaggagcgactccgacgccgaggctcaaggaaagccctcagaagtctctcttacctcatccgtgacctccctcgactcctctcctgttgacgtagctccaagaccaggaagtcacacgatagaattttttgaaatgtgtgcaaatctaattaaaattcttgcacagtaa

SEQ ID NO: 1051 - DNA, 330 bp, Rattus norvegicus
gacattcagggtgcctctttggggccaaggaaagagtgcgaccccgagaatcatgccaaggcttccccctatcctgcggctgctccaagcgcccgagaagtacacagtgattcctaaagcccgtatctcttccaagccagccaaatctcccacttccgccatggatcaggctgtggggatgtcagtcatagtcgctggcttcatggttccagcaggatgggtcttatcccacttggagagctataagagaagctccgcagcatgaggagctcggcgcatccctgagaggccaattaaacgcttccagtacctccaaaaaaaaaaaaagaa

SEQ ID NO: 1052 - DNA, 3027 bp, Rattus norvegicus
ggcagtagctggatgagggcgttgcttgcctcctcccttttttttctccgattggttctgaggggtatattcgagttgcaaaatggcggccccgagcgctctcttcagcgttcagtagcagcttcaggctgagcggatgtctcttctcctcagtttcggactcagagacacgcggctccctactcctgctgatcacgaagtccttgaaggcgctcaacgcaccggaatctcccagcggccgcgaccgccgcctcggccctgctctccgcggcgccggaactcagcgtgatctgcggcggccgtctaggaggttcacaaaaatggcgaagagagttgcggagaaggaattaacagataggaattgggatgaagaagatgaagttgaagagatgggaacattctcagtggccagtgaggaagtcatgaagaacagagccgtgaagaaggcaaagcgtaggaatattggctttgaatctgatagcggaggagcctttaaaggtttcaaagggttggttgtgccttctggaggaggagggttttctggatttggtggtggctctggagggaagcctctggaaggactgacaaatggaaacagcacagacagtgccacgcccttctccagtgcaaagacagcagcggagcctaaggcagcctttggttcttttgctgtgaatggccctactactttggtggataaaaagatctccagtcctaaatgcaatagcagcaatcagccgccctcctccggcccagcctccagtacctcctgcactgggaatacctatcataagcagttggctggcttgaactgctctgtccgggattggatagtgaagcatgttaacacaaacccactttgtgacctgacgcccatttttaaagactacgagagatacttagcgacgatcgagaagcagctggagaatgggggtagcagcagctcagagagacagacagacagggcgacggctgcaatggagcctccttccctttttggttcaacaaaactacagcaagattcaccattttcatttcatggcaacaaagcggaggacacatctgaaaagttggagtttacagcagaaaagaaatcggacgcagcacaaggagcaacaagtgcctcgtttaattttggcaagaaaattgagagctcagttttgggctctttaagctctggctccctaactgggttttcattctctcctggaaactctagtttatttggtaaagatgctgcccagagtaaagcagcctcttcaccgttttctgctaaagcatccgagagtcaagcaggaggcagcagcagtgagtgcagagatggtgaagaagaggagagtgatgagccacccaaggtggtggtgactgaagtgaaggaagaggatgctttctactccaaaaaatgtaaactattttacaagaaagacaatgaatttaaagagaagggtgtggggaccctgcatttaaaacccacagcaactcagaagacccagctcttggtgcgggcagacaccaacctaggcaacattctgctgaatgttctgatcccacccaatatgccgtgcacccggacagggaagaacaatgtccttatcgtctgtgtccccaaccccccacttgatgagaagcagcccactctcccggtcaccatgctgattcgggtgaagacgagcgaggatgctgatgagttgcacaagattttactgcagaaaaaggacgtctgagcactgaggctgaccagggcacgtcaccatgttgctgcttccctttgcccctaaacttagtcacattctttcctctttgtactgtgacattctgagaacttctaggtaacttgaaacttttgtgaggaagattaaggccaataaatcctttcagtgtgtcgaagctgttctcccttcctaagaactaagcaaaatacattggagtgaaaagtttgggaagattttttaatgtcgattcattgagtaaactaacctaagtgattcttacggactgtaatcagggtaccagttagctctccaaaggctccctcaggcagccacgggtgccactctcttcctgccctgggagactcaatggcagtgtccacagagttccagaagacgcctgctcccctcctgtgggcttgtttggtccgtgactagcactcctgccaaataccacaccggcacactgtaaccgcgcttgttctgtttccttctgagcggaactgtgggtcctggggatctctgtccttagcctgtttttgacaggtgctggcctttgacctggaactgcttgactgaaccaggcactgcctttccatgggaagagagggcaggtagtggcttgtcggggagctggcgaggtatagactgggttttgtcgtttatccatgaggtgctcttacttgcttacctccctagttaacatggatgggggctgtcaggaataatggattttattaaaagcacaaatttggtagcattttttaaatatcatttctataccacaaacaagcctttattttaaaagaaaaaagtgaaattgtgctgaaaagggttgtatgctcgtggccgtttgtgccccggggacctggtggtcacagtctgaatggagccctgtcagagggtgctcgtgagaaggaagagtgtgggagtggagacggctcattcggcctgtgacttcagacagcagcatgttattcagcgtctgaaaagvccaatttcatttttacctttttacggatgaggtattcttgagtctgcccacttggaagagagccatggttctacacgccattcatgccacttgagagcggtgaggttaccgatactagcattctctcaaggccagacatcagttaaatgcaaggtttgttgacgagctggtcacggctccctcctaaccccagtgccggaaagctgaggcaggaagaccgtgtgagttcacaacagcctgagctacgcagtaggaacccctccccctaaaataaaataaaagtttggtgtctaaaaaaaaaaaaaaaaaaaaaaaaaaaaaaaa

SEQ ID NO: 1053 - DNA, 3252 bp, Rattus norvegicus
tgaggatggagcagcggtcgggccgcggctcctaggggaggcagcgtgctagcttcgggggcgggccagtagcgggagcgagggccgtacggacaccggtcccttcggccttgaagttcaggcgctgagctgccccctcgcgctcggggtgggccggaatccatttctgggagtgggatcttccaccttcatcagggtcacaatggcagctacagtaaggaggcagaggccaaggaggctactctgttgggccttggtggctgtcctcttggcagacctgttggcactgagtgacacactggctgtgatgtctgtggacctgggcagtgaatccatgaaggtggccattgtcaagcctggagtgcccatggagattgtattgaacaaggaatctcggaggaaaactccggtgactgtgaccttgaaggaaaacgaaaggtttctaggtgacagtgcagctggcatggccatcaagaacccaaaggctacgctccgttatttccagcacctccttggaaagcaggcagataaccctcatgtggctctttaccggtcccgtttcccagaacatgagctcaatgttgacccacagaggcagactgtgcgcttccagatcagtccgcagctgcagttctctcccgaggaggtgctgggcatggttctcaactactcccgttccctggctgaagattttgcagaacaacctattaaggatgcagtgatcaccgtgccagcctttttcaaccaggccgagcgccgagctgtgctgcaggctgctcgtatggctggcctcaaggtgctgcagctcatcaatgacaacactgccacagccctcagctatggtgtcttccgccggaaagatatcaattccactgcacagaatatcatgttctatgacatgggctcgggcagcactgtgtgtaccatcgtgacctaccaaacggtgaagactaaggaggctgggacgcagccacagctacagatccggggcgtgggatttgaccgcaccctgggtggcctggagatggagcttcggctgcgagagcacctggctaagctcttcaatgagcagcgcaagggccagaaagccaaggatgttcgggaaaacccccgagccatggccaaactgcttcgggaagccaatcggcttaaaaccgtcctgagtgccaatgctgatcacatggcacagattgaaggcttgatggacgatgtggacttcaaggcaaaagtaactcgagtggagtttgaggagctgtgtgcagatttgtttgatcgagtgcctgggcctgtacagcaggccctgcagagtgctgagatgagcctggatcaaattgagcaggtgatcctggtgggtgggcccactcgtgttcccaaagttcaagaggtgctgctgaagcctgtgggcaaggaggaactaggaaagaacatcaatgccgatgaagcagctgccatgggggccgtgtaccaggcagcggcactgagcaaagccttcaaagtgaagccatttgttgtgcgtgatgctgttatttaccccatcctggtggagttcacaagggaggtggaggaggagcctgggcttcgaagcctgaagcacaataaacgtgtgctcttctcccgaatggggccctaccctcagcgcaaagtcatcacctttaaccgatacagccatgatttcaactttcacatcaactacggtgacctgggcttcctggggcctgaggatcttcgggtatttggctcccagaatctgaccacagtgaaactaaaaggtgtgggagagagcttcaagaaatatcctgactatgagtccaaaggcatcaaggcccactttaacctagacgagagtggagtgctcagtttagacagggtggagtccgtattcgagaccctggtggaggacagcccagaggaagagtctactcttaccaaacttggcaacaccatttccagcctgtttggcggtggtacctcatcagatgccaaagagaatggtactgatgctgtacaggaggaggaggagagccctgctgaggggagcaaggatgagcctgcagaacagggggaactcaaggaggaagctgaagccccaatggaggatacctcccagcctccaccctctgagcctaagggggatgcagcccgtgagggagaaacacctgatgaaaaagaaagtggggacaagtctgaggcccagaagcccaatgagaaggggcaggcagggcctgagggtgtccctccagctcccgaggaagaaaaaaagcagaaacctgcccggaagcagaaaatggtggaggagataggtgtggaactggctgtcttggacctgccagacttgccagaggatgagctggcccattccgtgcagaaacttgaggacttgaccctgcgagaccttgaaaagcaggagagggagaaagctgccaacagcttagaagcttttatctttgagacccaggacaaactgtaccaacctgagtaccaggaagtgtccactgaggaacaacgggaggagatctctggaaaactcagtgccacttctacctggctggaggatgagggatttggagccaccactgtgatgttgaaggacaagctggctgagctgagaaagctgtgccaagggctgttttttcgggtggaagagcgcaggaaatggccagagcggctttcagctctggataatctcctcaatcactccagcattttcctcaagggtgcccgactcatcccagagatggaccagatcttcactgacgtggagatgacaacgttggagaaagtcatcaatgacacctggacctggaagaatgcaaccctggccgagcaggccaagcttcctgccacagagaaacccgtgctgctttcaaaagacatcgaggccaaaatgatggccctggaccgggaggtgcagtatctactcaataaggccaagtttactaaaccccggccacggcccaaggacaagaatggcacccggacagagcctcccctcaatgccagtgctggtgaccaagaggaaaaggtcattccacctacaggccagactgaagaggcgaaggccatcttagaacctgacaaagaagggcttggtacagaggcagcagactctgagcctctggaattaggaggtcctggtgcagaatctgaacaggcagagcagacagcagggcagaagcggcctttgaagaatgatgagctgtgaccccgcgcctccgctccacttgcctccagccccttctcctaccacctcta

SEQ ID NO: 1054 - DNA, 2789 bp, Rattus norvegicus
gagctcactttgctcgccctgaaagagtttgcctcagatttgagccaaaataaaaactaaacaaatttcaagacaaaagaggtctccgccagtcaagaagccctcaaaagcattttaccatggatatagaagacgaagagaatatgagttccagcagcattgatgttaaagaaaaccgcaatctggacaacatgccccccaaggacagcagcacacccggtcctggcgagggtattccgctctccaacgggggtggtgggagcaccagcaggaagcggcccctggaggagggcagcaatggccactccaagtaccgcctgaagaagcgaaggaaaacgccagggcccgttctacccaagaacgccctgatgcagctgaacgagatcaaaccgggcttacagtacatgctgctgtcccagacaggacccgtgcacgcacctctgtttgtcatgtctgtggaggtaaacgggcaggtctttgaaggctccggccctacaaagaagaaggcaaagctgcatgctgctgagaaggccctgcggtcttttgtccagtttcccaacgcctctgaggcccacctggccatgggaaggaccctctccgtgaacacagacttcacgtccgaccaggcggacttccccgacacgctcttcaatggctttgagactccagacaagtcggagccacccttctacgtaggctccaatggggatgactccttcagctcaagcggagacgttagcctgtcagcctccccagtgcctgccagccttacccagcctcctctgcccatcccaccaccattcccacccccaagtgggaagaaccccgtgatgatcttgaatgagctgcgcccagggctgaagtatgacttcctctccgagagtggggagagccacgccaagagctttgtcatgtccgtggtggtagatggccagttctttgagggctcagggagaaacaagaagcttgccaaggcccgggctgcacagtctgccttggctactgtcttcaatttgcacttggaccaaacgccatctcgccagcctgtcctcagtgagggtctccagttgcatttgccacaggtattggcagatgctgtctcacgcctggtcctgggtaagttcagtgacctgacagacaacttttcctcccctcacgcacgaagaaaagtgctctctggagtagtgatgaccacaggtacagatgtcaaagatgccaaggtgataagtgtttcgacagggacgaagtgcatcaacggcgaatacatgagtgaccgtggcctggctctcaatgactgccacgcagagataatctcccgaaggtccctgctcaggtttctatacgcacagctcgagctttacttaaataacaaagaagaccagaaaaagtccatatttcagaagtcagagcggggtgggttccggctgaaggataccgtgcagttccacctgtacatcagcacctcaccctgcggagacgccagaatattctctccccatgagcccgtgctagagggtatggcgccagactcccaccagctgacagaaccggctgatagacatccgaatcgcaaagcaaggggacagctgcggactaaaatagaatctggcgaggggacaatccctgtgcgctcaaatgccagcatccagacctgggatggggtgctgcagggggaacggctgctcaccatgtcctgcagtgacaagatagcacgctggaacgtggtgggcatccagggggccctgctcagcattttcgtggagcccatctacttctccagcatcatcctgggcagcctgtaccacggggaccacctctccagggccatgtaccagcggatctccaacatagaggacctgccaccgctctacaccctcaacaagcccctgctcagcggtatcagcaatgcagaggcacggcagccagggaaggcacccaacttcagtgtcaactggacggtgggcgacacggccattgaggtcatcaatgccacaacagggaaggatgagctaggccgcccctcccgcctgtgtaagcacgcgctgtactgtcgctggatgcgggtacacggaaaggtgcccccccacctgctgcgcaccaagatcaccaagcccaccacctaccacgagtccaagctggcagcgaaggagtaccaggctgccaaggcacgtctgttcactgccttcatcaaggcggggctgggcgcctgggtggagaagcccacagagcaggaccagttctccttcactccctgagccaggcggagtcgagagcacagagtgcgaggctgtggtgccgaactgtcccccagagccttgcgtctgacctgggacaggtgtgcacctcggggacggcacggggagtctgggggaaccactggacttcaagcatcatccccggcgcctctcaccacccagcagggcagtgtggggatgtgtagggtgctgggcacctcacatctgagtagggatcaggtgcacagtgggggtgcatgggggcacaggggcccatcaccaccccttgccacacatttcccctcttgagctacccagtgaccgctttatatctcagtttacattagacattgagttctactgagtagggcttcctcaagtataggaaaatagaaatttactttgtgtgagattcttggataaataatttattcagagctaggaatgagatttataaaataagaagtaattatgtcaggtcacttttatgccacattattttaattgcaaaagaaaaaaaaagcgtttctatgtgaaagaacacaggaatctaga

SEQ ID NO: 1055 - DNA, 618 bp, Rattus norvegicus
cccagaatgtatcgtaggggaatacagagacggaaagggagaaaattttaactgtaaaaaatgccatgagagctgcatggaatgcaagggtcccggcagcaaaaactgcactgggtgctcagctggcctgctgctgcaaatggatgacagccgctgcctccgttgctgcaatgcttcccacccccacagatcccaggactgctgtgactgccagagttccacagatgagtgcatccttccagccagcgacgacactgtgttccatgagcacaccaagactgctctgctggtgacctcaggcgccatgctgctgctgctgttgggggctgctgtggtcgtgtggcggaagtcccgaagccaacctgtggcaaaggggcgctacgaaaagctggcagaacccaccgtgtcatactcctcctacaggagcagctatctcgacgaggaccaggtgattgagtacagggaccgagactacgatgaagatgatgaggatgacatcgtctatatgggccaagatggcactgtttaccggaagttcaagtacgggctgctggatgaggcagaagatgatgagttggagtacgatgatgagagctactcttaccaataagaattccc

SEQ ID NO: 1056 - DNA, 3819 bp, Rattus norvegicus
cggcccgcgcgggctgacgagcggagagtgcggtgcttcgcggtccccgagggtccgcacgccccggcagcgcggccgccagcaaccgcgcgaggagcagcgggcgggcgggcggcgccgggcccgggccgccctcgctcccacgccccggccccgccgcccgcgccggggcggcagccggcagaggaaaggcgctgcagtctccgggcctcgcggccccggtcgagcttcctgagcaccgagggcttgcgggtcctcaggggaggacacgagcccggagccgggcactgagctcttgggcgcccccaacccagttttcagaaccctccacgctgcggccgctgtcccctccggaccatggccgacgacgacgtgctgttcgaggatgtgtacgagctgtgcgaggtgatcggcaagggtcccttcagtgttgtacgacgatgcatcaacagagaaactggacaacaatttgctgtaaaaattgttgacgtagccaagttcacatcaagtccagggttaagtacagaagatctaaagcgggaagccagtatctgtcatatgctgaagcatccacacattgtagagctgttggagacatatagctcagatgggatgctttacatggtttttgaatttatggatggagcagatctgtgttttgaaattgtaaagcgagctgatgctggttttgtatacagtgaagctgtagccagtcactacatgagacagatactggaagctctacgctactgtcatgataataacataattcacagggatgtgaagccccactgtgttctcctcgcctcaaaagaaaattctgcacctgttaagcttgggggctttggggtagccatccagttaggagaatctggacttgttgctggaggacgcgttggaacacctcactttatggccccagaagtggtcaagagagagccttatggaaagcctgtggatgtctggggctgcggtgtgattcttttcatcctgctcagcggctgtttgcctttctacggaaccaaggaaagattgtttgaaggcattattaaaggaaaatataagatgaatccaaggcagtggagccatatctctgaaagtgccaaagacctagtgcgccgcatgctgatgctggatcctgctgaaaggatcactgtttatgaagcactgaatcacccatggcttaaggagcgggatcgttatgcctacaaaattcatcttccagaaacagtagaacaactgaggaaattcaatgcaaggagaaaactaaagggtgcagtactagcggctgtgtcaagtcacaaattcaattccttctacggggaccctcctgaagagttgccagatttctccgaagaccctacctcctcaggacttctagcagcagaaagagccgtctctcaggtgctggacagcctggaagagattcacgcacttacagactgcagtgaaaaggacctagattttctacacagtgttttccaggatcagcatcttcacacactgctggatctgtatgacaaaattaacacaaagtcttcgccacaaatcaggaatcctccaagcgatgcagtacagagagccaaagaggtattggaagaaatttcatgttaccctgagaataatgacgcgaaggaactaaagcgtattttaacacaacctcatttcatggccttacttcagactcaccacgtagtggcacatgaagtttacagtgatgaagcattaagggtcacacctccgccgacttccccgtatttaaacggtgattctccagaaagtgcaaatggagacatggacatggagaatgtgaccagagttcgcctggtacagtttcaaaagaacacagatgagccaatgggaatcactttgaaaatgaatgagctcaatcattgtattgttgcgagaatcatgcatggcgggatgattcacaggcaaggtacacttcatgttggtgatgaaatccgagaaatcaatggcatcagtgtcgctaaccaaacagtggaacagctacaaaaaatgcttagggaaatgcgagggagtattaccttcaagattgtgccaagctaccgcactcagtcttcgtcatgtgagagagattccccctccacttccagacagtcccctgctaatggtcatagcagcactaacaattctgtttcgatctatgtaagagcacaatttgaatatgatccagccaaggatgacctcatcccctgcaaagaagctggcatccggttccgagttggtgacatcatccagattattagtaaggatgaccacaactggtggcagggtaaactggaaaactccaaaaacggaactgcaggtctcattccttctcctgaacttcaggaatggcgagtagcttgcattgccatggagaagaccaaacaagagcagcaggccagctgtacttggtttggcaagaaaaagaagcagtacaaagataaatatttggcaaagcacaatgcagatcttgtcacgtatgaagaagtagtgaaactgccagcgttcaaaaggaaaacattagtcttattaggtgcacatggtgttgggagaagacacatcaaaaacaccctcatcacaaagcacccggagcgcttcgcgtaccccattccgcatacaaccagacctccaaagaaagatgaagaaaatggcaagaattattactttgtatctcatgaccaaatgatgcaagatatctcaaataatgaatacttggagtacggcagccatgaggatgcaatgtatgggacaaaactggagaccattcggaaaatccatgagcaggggctgattgcgattctggacgtggagcctcaggcattgaaggtcctgagaactgcagagtttcccccttttgttgtcttcattgcggcgccaactatcactccaggtttaaatgaggatgaatctcttcagcgcctgcagaaggagtccgatgtcttgcagagaacatatgcacactacttcgatctcacaattatcaacaatgaaattgatgagacaatcagacatctggaggaagctgtcgagcttgtgtgcacagccccacagtgggtcccggtctcctgggtctattaggcttctctgtggctatctgagtataaaaccaggagccacttcctatgtggaaaagcctctttgttatcggccttgtgtcagcaggtcgtggtccctagagactacctagttgtagtgtgacctacatttataattattgtcatgtccgaatagataggaggagaaaatcaattacacactaatttaaagagacagtatcttttttaatcagttctcctaaactttaataaaatgtatctttaaatgtatgtattattcaatcctttggaatgttatatttttggaaatcatagctttttatttccaaggcccctaaaaactgcacaaaatagatgctgctttctataatctattttaataataataaacatgattctgttaccttgactgggggtggaacactacattctttttagagtctgattttatggattggaatacctttctttcctttatttatttgaaatgattagtctagtgattacaaaacagtcataaatttttaaaggccttttttctctctcttttttttaagtcctttatgtaacatccagatactgtgatactgtctctttgaagcaccctgtaaaccttttagagatttgaagttgggtcttgactcttaatgcatgtggacagtcgcgagcgtttatgctgtcggtgtgtctgtgttggacaaaacaatctgtaattacagcgaagtacattccgttcacggggcataccctgggg

SEQ ID NO: 1057 - DNA, 276 bp, Rattus norvegicus
accatgactgcttctgacctgccttggcacagcaaagaaaaggattcatcaacagcttccgttgtcacgccaaggtaaatagtacgtgtaggtagaaataaagacaaaggggaacgaaaatgcctctgcacacgggtcagtatattacaggagacaaggacggagtcacgaaggctaacaaacaggatctagtattccacgtaggagttccaagccttttgttgtttctgtttcgtaaaataaaaaaacattacacattccgggagaaatgaatgt

SEQ ID NO: 1058 - DNA, 901 bp, Rattus norvegicus
gctggccgggtcgaccctggtgtcatccgtttaggaagcggcttcaccgccaacagcacggccatggctggagctctggtgcgcaaagcagcggactatgtccggagcaaggacttccgggactatctcatgagtacgcacttctggggcccagttgccaactggggtctccccattgctgctatcaatgacatgaagaaatctccagagattatcagtgggcggatgactttcgccctctgttgctattctctgacattcatgagatttgcctacaaggtacaaccccgaaactggcttctgtttgcgtgccatgtgacaaacgaagtcgctcagctcattcagggaggacgacttatcaactacgagatgagtaagcggccatctgcctagcagtgcaaggaccagctcttgaaagggacagtgctccagccactgttgcggccacagatcacgtcagcatgaatagtcgtgctgaggggaaaacacggaagactatctttaatgaccatgccaacattattgaatagccaagaatccccaaaccaactctcggctgccttatcaatgctaaactttatttgtcttcatcaggagtagttcaaaatatgcagctaatttaataattttgaatgatgttatctatagcaatctgtagtaatatgtatattatctattgggatttgtgtaataaaaaatctaagggaacaaaactttataactacaagcacttaagtcctcaaaattcttgactttttctttaatgactatagtataaccctcagttggtcacatgtctacacataatttccagtgataacaagtagcggtgttttccatatgtaattcagatctgaacttaatggcaataaatggtttaaatatttgcgaaaaaaaaaaa

SEQ ID NO: 1059 - DNA, 2746 bp, Rattus norvegicus
gctcctcacagctccccctccacctctgagtggatcctcctctgagtttctcttcttcctcagagctcctcctcctcccggtcctgcaaggctccagacttctcgacttggtttcagaaagcaccggtggctgtagtcgggattgagaggtgtttccaaagaaacccaaagagcagcagggcagccatgaggatgccgacggggtctgaactgtggcccatagccatattcacgatcatcttcctgcttctggtggacctgatgcacaggcgccagcgctggacttctcgctaccctccgggccctgtgccctggcctgtgctgggcaacctgctgcagatagacttccagaatatgccagcgggctttcaaaagctgagatgtcgctttggggacctgttcagcttacagctggcctttgagtcggtggttgtactgaatgggctgccagccctgcgagaggcactggtgaaatacagcgaggacaccgctgaccggccaccgctgcatttcaatgaccagtcgggctttggaccacgctctcaaggtgtggtcctcgcgaggtatggacctgcctggcgtcagcagcggcgcttctctgtgtccaccttccgtcactttggcctgggcaagaagtcactggagcagtgggtgacagaggaggccagatgcctctgtgctgccttcgctgaccatagtggattccctttcagccctaacactctactggacaaagcagtgtgtaacgtgatcgcgtccctcctctttgcctgccgctttgaatacaatgacccacgcttcatcaggctcctggacttgctgaaggacactcttgaggaggaatctggattcctgcccatgctcctgaatgtgttcccgatgctcctacacatcccagggcttcttggcaaggtattctctggaaagaaggccttcgttgccatgctggacgagctgctaactgaacacaaggtgacctgggaccctgcgcagccaccccgagatctgactgatgccttcctggctgaggtggagaaggccaaggggaatcctgagagcagcttcaatgatgagaacctgcgtgtggtggtggctgacctgttcatggcggggatggtgaccacctccaccacactgacctgggccctgctgttcatgatcctgcgtccagatgtgcagtgccgagtacaacaggaaatcgatgaggtcatagggcaggtgcggcgtccagagatggcagaccaggcacgaatgccgttcaccaatgctgtcatccatgaggtgcagcgctttgcagacattctccctcttggtgtgcctcacaagacttctcgtgacattgaagtgcagggcttccttatccctaaggggacgaccctcatcatcaacctgtcctcagtgctgaaggatgagactgtctgggagaagcccctccgcttccaccctgaacacttcctggatgcccagggcaactttgtgaagcatgaggccttcatgccattctcagcaggccgcagagcatgcctgggggagcccctggcccgcatggagctcttcctcttcttcacctgcctcctgcagcgcttcagcttctccgtgcccgctgggcagccccggcccagcaactatggcgtctttggtgctctgaccaccccgcgcccctaccagctctgtgcttcaccccgctaaggggaggcacagcatctcactcactgtgcttgctggggtcctagtgtgcaataaatggttttactctgaaccgaatcatccctgtgagctctccaggctgtaaggggcctgagcagccttcccgtggacatccgcacccctacttaatcttccttgaccatgtgccccaatggaagggctgctctactgacctccgaaatggcagccattcttgctttcacccctgccccctcttttcacccaaattgatgatgtttattcatagatgccaacatctggaaggagggccagaaaggactgctgtgaagggtcagtgtaagtcacacagatgagggaaggggcggtggaggtaatggtgggcagaattgtcccctttccacttgagatgtttctcccagacgcccccatttcagacccactacacaaccaaggctaactcctcagccagcatcatcacaacttcttatatgacgtcgcagagatgtagagaagtcggggaggctggaaatgacatgcaggttaagtgcccaaggttacctgttgggtaccacatgcttccctaaacggttttgtgggggtccagaagcaggttgcctcctaagcttctttgtcaccattaattccatgacccagcagggatactggtgtccaggcccatgcacagtaagaaagtgactctaaccagggatggaaggacccgcaagcttagtgttgacacagactcccagaccttagcacaactgactccatggtagaagtaccatttgggccataaaacttagcacgtagacagcagctcctctcataatgaaaacaaagacctaacccatcaaattctatcctgggaaggtctcttgaagcactcctcttggcttcttggcttctgtagttctcctagctaactgctcttgctaactgaagtatgtcaacccaggatatggttgttggtaaaagctcgccctgagaacagctcaggacgacattgaggtgacccagtgtagtcaccagccagctaataaagacctccttttggtttaaaaaaaaaaaaaaaaaaaaa

SEQ ID NO: 1060 - DNA, 5180 bp, Rattus norvegicus
gaattccgcacccggggcgggacaagaggtctgctttccaaagagaaggcttcgcgtctgtctgcagcaggcgacagtcccgggcgccacctgcgcttcgggcgcgggccaggctggtgcgcgccgggcccccagcgcccgctactgagagcgtgaagtgaccgaccgtgagtcctccggcttgcgtccccttccagcaccagggactcacgccccaattactgcttgctcaagggtggacgagctccggccgagccgctgccccgccccgtactacctggcagctgcccgggtgcagcgcacagcgccccgcgcggccccagcagagcccctgccctcccacctgcgccgcgcgcccgccgctccgtgctcccgagacaggagacgcggccccgctcccgctcgcgcccgcgcactcggcgcagcgcgcgcgcccgccgctccgcccgccccccgcgctctccccgccccctccctcccccgcaggcacgagcgaatgtagcccgcgagagaaaatggcggcggcggcgggcgatcgcgcctcgtcgtcgggattcccgggcgccgcggcggcgagccccgaggcgggcggcggcggcggagctctccagggaagcggcgcgcccgcagcgggcgcggggctgctgcgggagactggcagcgcgggccgcgagcgcgcggactggcggcggcagcagctgcgcaaagtaaggagtgtggagctggaccagctgccggagcagccgctcttcctcaccgcctcgccgccctgcccatctacttccccgtcgccggagcccgcggacgcggctgcaggagcgagtggcttccagcctgcggcgggaccgccacccccgggagcagcgagtcgctgcggctcccactctgccgagctggcggccgcgcgggacagcggcgcccggagccccgcgggggccgagccgccctctgcagcggccccctccggtcgagagatggagaataaagaaaccctcaaaggattgcacaagatggatgaccgcccagaggagcgaatgatcagggagaagctcaaggcgacctgtatgcctgcctggaagcacgagtggttagaaaggaggaacaggagaggccctgtggtggtgaaaccaatccctattaaaggagatggatctgaaatgagtaacttggcagctgagctccaaggagagggccaggcaggctctgctgcaccagctcccaagggccgacgaagcccgtctcctggaagctccccatcagggcgctcagggaagccggaatccccaggagtgagacggaaacgagtgtccccagtgcctttccagagtggcagaatcacaccacctcgaagagccccgtcgccagatggcttctcaccgtacagcccagaggagacgagccgccgtgtgaacaaagtgatgagggccaggctgtacctcctgcagcagataggacccaactctttcctgattggaggagacagtccagacaataaataccgcgtgtttattgggccacagaactgcagctgtgggcgtgggacattctgcattcacctcttgtttgtcatgctccgggtgttccagctagaaccctccgaccccatgctatggagaaaaactttaaaaaattttgaggttgagagtttgttccagaaataccacagtaggcgtagctcaagaatcaaagctccatctcggaacaccatccagaagtttgtctcacgcatgtcaaactgtcacacattgtcatcgtctagcacatccacatctagttcagaaaacagcatcaaggatgaagaggagcagatgtgtcccatctgcttgttgggcatgctggatgaggagagcctgactgtgtgtgaagacggctgcaggaacaagctgcaccaccactgcatgtcaatctgggcagaagaatgtagaagaaatagagaaccgttaatatgtcccctttgtagatctaagtggagatcccatgacttctacagccatgagttatcaagccctgtggattcccctacctccctgcgaggtgtacagcagccctcctccccgcaacagcctgtggccggatcacagcggaggaatcaggaaagcaattttaaccttactcattatggaacccagcagattcctcccgcttacaaagatttagccgagccatggattcaggcattcggaatggagctcgttggctgcttattctctagaaactggaacgtaagggagatggcccttaggcgcctttcccacgatgttagcggggccctgttgttggcgaacggggagagcactggaacttctggaggcggcagcggaggcagcctaagtgctggcgccgccagtgggtcttcccagcccagcatctcaggggacgtggtggaggcgttctgcagcgtcctgtctatcgtgtgcgctgaccctgtctacaaagtgtacgttgctgctttaaaaacactgagagccatgctggtatacactccttgccacagcctggcagaaagaatcaaacttcagagacttctccggccagtggtagacaccatcctagtgaagtgcgcagacgccaatagccgcacgagtcagctgtccatatcaacactgttggagctctgcaagggccaagcgggggagttggcagttggacgagaaatacttaaagctggatccatcggtgttggtggcgttgattacgtcttaagttgtattcttggaaaccaagctgaatcaaacaactggcaagaactcctgggtcgcctctgtcttatagacagattgctcttggaaatttctgcggaattttatcctcatattgtcagtaccgatgtctcacaagccgagcctgttgaaatcaggtataagaagctgctgtccctcttagcctttgccttgcaatccattgacaattcccactctatggtcggcaaactctcgcggaggatttatctgagctcagcacgaatggtgaccacagtgccccccctgttttccaagctggtaaccatgctaagtgcttctggatcctcccacttcgccaggatgcgccggcgtctgatggccattgcagacgaggtagaaattgccgaggtcatccagctgggttcggaagacactttggatggccagcaggacagctcgcaggcattggcccctccccgctatccagagagcagctcccttgagcacacagcccatgtagagaaaactggaaaaggattaaaagctacgagactgagtgccagctcagaggacatttctgacagactggctggcgtttctgtaggacttcctagttcagcaacaacagaacaaccaaagccaacagttcaaacaaaaggcagaccccacagtcagtgtttgaactcctctcctttgtctcctcctcagttaatgtttccagcaatatcagccccatgttcatctgccccgtctgtcccagctggctctgtaacagatgcttctaagcatagacctcgggcgtttgttccctgtaaaataccctctgcgtctccccaaacacagcgcaagttttccctacagttccagaggacctgctctgagaaccgagactcagaaaaactctccccagtctttactcagtcgagacccccaccctccagtaacatacacagggcaaaggcatcccgacccgttccgggtagcacaagcaaactaggggatgcctcaaaaaacagcatgacactcgacctgaacagtgcttcccagtgtgatgacagctttggcagtggcagcaacagtggcagcgccgtcatacccagtgaggagacggcattcaccccagcagaggacaagtgcaggttagatgtcaaccccgagctcaactccagtatcgaggaccttcttgaagcatctatgccttcaagtgacacaacagtcactttcaagtccgaagtcgccgtcctctctcctgagaaggccgaaagtgatgacacctacaaagatgacgtcaatcacaatcaaaagtgcaaagagaagatggaggctgaggaagaggaggcgctcgcgattgccatggcaatgtcggcttctcaggacgccctccccatagtccctcagctgcaggtggaaaatggagaggatatcatcatcatccagcaggatacaccagaaaccctaccagggcataccaaagcgaacgagccctacagagaagacaccgagtggctgaaagggcagcagataggcctcggagcattttcttcttgttaccaagcacaggatgtgggcactggaactttaatggctgtgaaacaggtgacctacgtcagaaacacatcttctgagcaggaggaagtggtggaagccttgagggaagagatcaggatgatgagccacctcaaccatccgaacatcatcaggatgctgggggccacgtgcgagaagagcaactacaacctcttcatcgagtggatggcgggagcctccgtggctcacctcttgagtaaatatggagctttcaaggagtcagtggtcattaactacacagagcagttactccgtggcctttcctatctccacgagaaccagatcattcacagagacgtcaaaggggccaatctgctcattgacagcaccggtcagcggctgagaattgcagacttcggtgctgccgccaggttggcatccaaaggaactggtgcaggagagttccagggacagttactggggacaattgcattcatggcgcctgaggtactaagaggtcagcagtacggtaggagctgtgacgtctggagtgttggctgcgccattatagaaatggcctgtgcaaaaccaccctggaacgcagaaaagcactccaatcatcttgctttgatatttaagattgcgagtgcaactactgcaccatccatcccgtcacacctgtccccgggcctgcgagacgtggctctgcgctgtttagaacttcaacctcaggacagacctccgtcaagagagctactgaagcatcctgtcttccgtacaacatggtagtcaactgctcagggtgcgcaacaaggaaagaaaactcgcgggcagccacgttgatagtctgctggcctcataccactgaccagaagaggggccagtggggagcccgcacctaagcatgtgactgacaaatcatgactgcacctgagctccgtctgcagacggctacaactcgtgcaggagctg

SEQ ID NO: 1061 - DNA, 2412 bp, Rattus norvegicus
ggcacgaggatggcggcgggaaccagcaattactgggaagatcttaggaaacaagctcgacagctggaaaatgaacttgacctgaaactagtttccttcagtaaactgtgtacgagttacagtcacagcagcgcccgggatggaggccgcgataggtatagttctgacacaacacccctattaaatggatcaagccaagacaggatgttcgagacaatggccattgaaattgaacagcttttggcgaggcttacaggagtaaacgacaaaatggcagagtatactcacagtgcaggggtgccctccctgaacgcagccctgatgcacacgctacagcgacacagagacattctgcaggattatacacatgaattccataaaaccaaagcaaactttatggcaatacgggaaagggagaatctcatgggatcagtacgaaaagatattgagtcatataaaagtgggtctggagtaaacaacaggagaactgaactgtttctgaaagaacatgaccaccttcgaaactctgatcgtctgatagaagagacaataagcattgctatggcaacaaaagagaatatgacttcgcagagaggaatgctcaagtccattcacagcaagatgaacactctggccaaccgctttcccgccgtcaacagcctgatacaaaggatcaaccttaggaagcggcgcgactcgctcatccttggaggcgtcattggcatctgcaccatcctgttgctgctgtatgcattccactgagaggtcggccccaggactctgcccaccctctgcggcctgctttggcaatggggaacctgcaaaggagagagaccgtccggccatgagcctgccagcagatgaattctaaactgcaccgtggctctgacctggtcggcctgagctgaagccacagtttttctgtgcctatcttttctaatacatattactctgtttttaattttaaaaacaacaaaaggtttcagttgctgcatctccctaggaggtaagcaagcagaagctgagaacctgggctttagtgactggtgaagccagatgaccagcgggcctcatagctggactcctcacagcaccaggctctacatccaaagatggcctcactttcagccacgagattggatgtgaataaaaataattcttgtccttttatttaacacttgtgatgagaagtcagctgtcctttgctgatactccgtgatccaatcgcgtattctgtgtccctaatctcttggcagtcaagaaaaattccatttcccacggattctgtaagatgttggtaggccagcttcatgtttgaggcggtctgaaatggaaagtgctatagaaagggtgtctcttttctgtttcagttgtgagccctgggtcaactactgccaccagcacatcagaatggcgggccttacagaggagctggtcattgctttattatttcttcccttgggctgatatttgcttgtattgataaaaatgcatttccagtgatagcccgtcagtgactgtcatcggccctcgaagtcccatatcatgtgaagcttaatactaggaactgaaggagggacttggttctctgtgaggcctgctcgtgagccactgctgtgagggttgggaggataaaattatgttttgggttttggtggtgggagattattttggagttgttgttggttgggaatgtggtgagggatatagagtaaattagtcgagtatagaagaataggcttaatagggctatgatagctattagtgttgatagggttgagcagttgttttttagaagctcggagataattgctcattttggtaaaaatcctgtgagaggggggagtcctcctagtgataggaggatgatggatgctatggttaggattatgggagttttatttcatgcgagtgagagtgtgttgattgttgttgctgagtttgttatgagtgtaatgaatattggaacagtaagtaggatgtaaattgttaagtttaggagggttaagttagggttgtatggaaggattgctgttattcatcctatgtgggcaattgatgagtatgctatgcatttttcgtgtttgggtctggttaagtcctcctcaggcgccaacaaagactgatgaaattgcgagaatggtggtgatagttgggtttaggagttgataaaattggtatagaattgatagtggagcaattttttgtcatgttagtaagattaatccaatgtgtaggggaattccttgggtgacttcgggtagtcagtagtggaatggggctagtccaagttttatggctagtgaaatgagtattatgttgagtagtatgttattggtttgttgttggagggttcatattcctgattgtttgtagttgaggatgatgactagtaggataattctcgtgccg

SEQ ID NO: 1062 - DNA, 2484 bp, Rattus norvegicus
gggatcaaagcttagtgtcctgaggtgcggagcttggaacgcgaagaaaagtgaccatggacaacaacgaaacctccgtggattcaaaatccattaataattttgaaacaaagactatccatggaagcaagtcgatggactctggaatatatctggacagcagttacaaaatggattaccctgaaatgggcttgtgtataataattaataataagaacttccataaaagcactggaatgtcagctcgcaatggtaccgatgtcgatgcagctaacctcagagagacattcatggccctgaaatacgaagtcaggaataaaaatgaccttactcgtgaagaaattatggaattgatggatagtgtttctaaggaagatcacagcaaaaggagcagttttgtgtgtgtgattctaagtcatggagatgaaggagtaatttttggaacgaacggacctgtggacctgaaaaaactaactagtttcttcagaggcgactactgccggagtctgactggaaagccgaaactcttcatcattcaggcctgccgaggtacagagctggactgcggtattgagacagacagtggaactgacgatgatatggcatgccagaagataccagtggaggccgacttcctgtatgcttactctaccgcacccggttactattcctggagaaattcaagggacgggtcatggttcatccagtcactttgcgccatgctgaaactgtacgcgcacaagctggaattcatgcacatcctcactcgtgttaaccggaaggtggccacggaatttgagtccttctccctggacgccactttccatgcaaagaaacagatcccgtgtattgtgtcaatgctcacaaaagaactgtacttttatcactaaaggaatgactgggagtggggtaggggcatgtttctgttttggtttttttttttggtttttgttttttgtttttttttttttatttgaatgccaaatgagaaaactgtcagggagactttttttttcccctctcatttaaatcaaatccgatgttccaggtcgtcattgaacaataccactgcctgcaatgcagccacaatacaatacctcagctttgatatcaggtagttgaaatgaaatttaattaggaacaaataaatgtcaataatggtacaaccatcatagaagaaattggaaagtcacactttggtaattagagagatttggtgccactatgaatttgaaattacgaagcagtgatgatcttataccccctcctcacatctagaatgtcactttagttttcgttaagcataggaacgataatgtcaagtggtatgtcttagaacttgaatccacgagcagagtcaaaggctggttttggaactgatctgtggaaatgaagagttggagcactgtagcacacattatagctactggttttgtgacagttgaccaggtcacatatttattatttaagacaaaagtcgtgttttattattggaacaaaaataactttatatgagaggaaaaccatgtgtgaacttggttggcttgttgaaggctaccatccttcagtggtggacatgacgacagggtgctacgatccaccagcatttgtttcttacttattcttatgcaaatcagcctaattttacagaccagcaaaatatctaaagagcgattatgcagcagcctcaaattgttgactattagaatggaataaaggaattctacaggaacagaccataataccagctgtcagtcagagcgtaaggaaaggagaggtggcatctcctgtgattggagagaagatggtttgagccggagcagagccatgggcacgtcttcagaaaaggcctgctagttggacccaccttgtgagcactggtctgtgtggatgatgtccaagttaccacatgagactgaaccagatcagaagctcctgcaaaaaggctttcccagagtgctgagcatctcaagaaagttcactggactccatgtacagagtctgtagcatgctgacttttctgttgaagtttacaatgaaaggaaaatgatggtgatatttgtaccgtcactagaaatgaagggccctggcacacgggacttggaaagcatccagcaataggccctgcagcccatgtggaggagctgcagactggagtccacccctcctccccatcagggcgtctgtgctccaggcttccttaatcatggaggtgctgagtcatcgctggctctccctgtgggtccagcatttcccataagcctccttattgcacaaagaaaggaaggaactcacattataactgatagtaggttcttgtttagactggatttactgttaactcttttctaagtaaatacagcatgtggtggtattttaaaatgtgttcccatgtgacaattttataaaagtcagatatcttgcatttttatttcaaaacataaattcagatttaaaattaaaaaaaaaaaaaaaaaaaaaaaa

SEQ ID NO: 1063 - DNA, 2175 bp, Rattus norvegicus
  misc_feature (1)..(2175): n = a or c or g or t
atgagcgcagaggggtaccagtacagagcgctgtatgactacaaaaaggaacgagaggaagacatcgacctacacttgggggacatcctgactgtgaataaaggctccttagtggcacttggattcagtgatggccaggaagcccggccagaagatattggctggttaaatggttacaatgaaactactggggagaggggagactttccaggaacttatgttgagtacattggaaggaaaagaatttcaccccccactcctaagccacggccccctcgacctcttcctgtagcacccggttcttcaaaaactgaagcagacactgagcaaccagtgttgacccttcctgatctggccgagcagtttgcccctcctgatgttgccccgcctctccttataaagctcctggaagccattgagaagaaaggactggaatgttcaactctatacagaacacagagctccagcaaccctgcagagttacgacagcttcttgattgtgatcccccctcagtggacttggatgtgttcgatgaacacgttttagcagatgctttcaaacgctatctcgccgacttaccaaatcctgtcattccagtagctgtttacaatgagatgatgtctttagcccaagaagtaccaagctccgaagactacatccagctgttgaagaagctcattaggtcgcctaatatacctcatcagtattggcttacgctccagtatttgctcaagcacttcttcaagctctctcaagcctccagcaagaaccttctgaatgcaagagccctctctgaaattttcagccacgtgcttttcagattcccagcagccagctctgataatactgaacacctcataaaagcggtagagcttttaatctcagcggagtggagtgagcgacagccagcaccagcactgccccctaaaccacccaagcccacttctatagccaacaacagcatgaacaacaatatgtccttacaggatgctgaatggtactggggagatatctcaagggaagaagtaaatgaaaaactccgagacactgctgatgggacctttctggtacgagatgcatccactaaaatgcacggngactacactctcacactaaggaaaggaggaaataacaaattaatcaaaatctttcaccgagatgggaaatacggtttctctgatccattaaccttcaactctgtggttgaattaataaaccactaccggaatgagtccttagctcagtacaatcccaagctggatgtgaagttactctacccagtgtctaaataccagcaggatcaagttgtcaaagaagataatattgaagctgtggggaaaaaattacatgaatataatactcaatttcaagaaaaaagtcgggaatatgatagattatatgaggaatacactcgtacttcccaggaaatacagatgaaaagaacagctatcgaagcatttaatgacaccataaaaatattcgaagagcagtgccacccccaggagcggtacagcaaagactacatagagaagtttaaacgcgaaggcaacgagaaggaaattcaaaggataatgcataatcacgataagctgaagtctcggatcagcgagatcatcgacagcaggaggagactggaggaagacttgaagaagcaggcagccgagtatcgcgagatcgacaagcgcatgaatagcattaagccggacctcattcagctgagaaagacaagagatcaatacttgatgtggctgacgcagaaaggggtccggcagaagaagctgaacgaatggttgggaaacgaaaacacagaagaccaatactcactggtagacgatgacgaggatttgccccaccatgatgagaagacgtggaatgtggggagcagcaaccgaaacaaagccgagaacctattgcgagggaaacgagatggcactttcctggtccgggagagcagtaagcagggctgctatgcctgctctgtagtggtagatggcgaagtcaaacattgcgtcatcaacaagactgccaccggctatggcttcgccgagccctacaacctgtacagctccctgaaagagctggtgctacattaccaacacacctccctggtgcagcacaatgactccctcaatgtcacactagcatacccagtatatgcacaacagaggcgatga

SEQ ID NO: 1064 - DNA, 636 bp, Rattus norvegicus
atggaggctcaaggctctagccatgatatcagccgcttactctgcctgggagtcaaggaagactcggaagaacagcatggtcagtacctgggtgatgtgaaagcagaggctttctttcaggctggagaggggagagacgagaaaggtgcacagggtcagcctggagagggagcagtgggaacagaaggcgaaggagaagaattaaatggaggagaaggccactttggtcctggtgttccaggtcctgtgggtgagggggacaaggatggtggcaccagagctagtggcatggaggaggagcaacatgagcccgttgccgagggcactgagagtgtcaagtctgaggataagcagatgccactccgccgccctgggtccacccagcggcggctggcggaattggagcgcattttgctaagcagtggttcctccagtggcgggaggagcttgatagatggatggatatcagtgtgtccagagtgcaggaattggtttaagattaggagggctgcatacagaagaaataggaggcggagaacaccaatccctgaacattttagagcaacatctgggtgccctgcttgtcttggagcaagatggggagtaagatgtccttttgcaacaccgagattttga

SEQ ID NO: 1065 - DNA, 487 bp, Rattus norvegicus
gcagagcagaggagcggcgggagaggaacacttctcccaggctttagcagagccggcaggatggcgaccgtggtggtggaagccaccgagccggagccatcgggcagcatcggcaacccggcggcgaccacctcgcccagcctgtcgcaccgcttcctagacagcaagttctacttgctggtggtggtcggcgagacggtgaccgaagagcacctgaggcgtgccatcggcaacatcgagctggggatccgatcgtgggagacaaacctgatcgagtgcaacttggaccaagagctcaaacttttcgtgtctcgacactccgcgagattctctcctgaagttccaggacaaaagatcctccatcaccgaagtgacgtcttagaaactgtagttctgatcaacccttcggatgaagcagtcagcaccgaggtgcgtttggtgatcactgacgccgcccgccataaattgctggtgctctccggacagt

SEQ ID NO: 1066 - DNA, 2006 bp, Rattus norvegicus
gcgcgcgcggccagcgagacctcccggctccactggcggcgcgggcggcggtaaaatgtcggctccaggaccttaccaagcagctgcaggcccttctgtaatgcctactgcacccccaacctatgaagaaacagtgggtgtcaacagttactacccaacgcccccagcacctcagccgggaccagccacagggctcattacgggcccggatgggaagggcatgaatccaccttcgtactacacccagcccgtgcctgtccccaacgccaacgcaattgcagtgcagacggtttatgtgcagcagcccatctccttctacgaccgccccatccagatgtgctgtccttcctgcaacaagatgatcgtgacccagttgtcctacaatgcaggagccctcacctggctctcctgtggcagtctgtgtctgctgggatgcgtcgctggctgctgcttcattccgttttgcgtggacgccctgcaggatgtggaccattactgccccaactgcaaagcgctcctgggcacctacaaacgtttgtaggactcggccagccacaggggaggtagacaagtgctcccggaagtcacccaacccttgcccagcgcagccagaagacgtcccttccttgatctcttcatgagctcgtcttcgtgtcttttagggggtggggaaagtcggaaaagtaacaaacccccaaacccagaaactgctgctggagttgtgccctgcacatgcaaagacgtggaccttgggtgttgctttaagggtttaccgcctgatctcgttaccccactaactgtgattgttactccatttgcatctcgtctgctgatttgccactgcctgccccctcttcctcaagaagaggccttcctggtgccaggctcaaaacccgaagctacagtttgccttatttttcactgtttggcttgatctgtaccatctctcccagccctaatgacagagaccttgccttaaagactttgcggttctgtaattgcagacttctccagcactcagaatcactttcaattccatagagttgttcctctccacacacacccctcccccggtgcacagaagggctgccgacacccaccagactcatacagagaaggtcacaagtactaaatgaaaggctcccagcccaccttgtctcagcccctgtcctgtgaagggactccttcctcacacagtttctgtgacttccttttgttcttaaacacatggaagttacttggcagggagacatttctagaataatttttgtgatcacgatacacccttcattctccgtttgctggtatgtttttagttggtttggttttagttttccacatacagtctagctcgtggccagccttgagctccgaggagatcctccatcttctcctctcaaatacccagggcccagacatttgcctctgcacctgctgggctttttctctcatttttccttaaccagaaaaacaaacgggtaatttcatcgactgcctatgtaggtttggtgtggttttgaaaaccttgtttccatggggccctttgggggagtcagggggcccctgcacgagcccatgcttcaatgccgagagattggctgctggaaccccctgaagcatgatttcatgttttagagatgagcttctgtggtacggtcatcatggtctccaacatcaacagacaaggtagaaggatgtcaacgacaaagataagttcagggctctttctagggtcaccactctgtcctgtgtaacactgacacagtctggccagcctttcaggaggtcctggctccctcctaaacccatgtaggwcttgctgcaagtaacagtgtatgaagtcaacctgacctggaacagaagtctgcatattggttaagatacagcctatgtatcttcatacaacgatccagaagtactagacatcatttttgcagtgaattatgggtaccatacatgactttgatgatatctgcttttaaacaaataaaatctttgatcactca

SEQ ID NO: 1067 - DNA, 1948 bp, Rattus norvegicus
cctcgggctgaatgaatgagccggagcggcggagcccggctgcccgcgaccgcgctcagcggcccgggacgcttccgtatggcccgcgagcagccggcgcccgtggcggtggcggcagctaggcagcccggaggagaccggagcggcgatccggcgctgcaggggccaggggtcgcccgcagggggcggccgtccctgagtcgcactaaattgcacgggctgcggcacatgtgcgcggggcgcacggcggcgggaggctctttccagcgacgggcgctgtgggtgctggccttctgcacgtccctcggcttgctgctgtcctggtcctcgaaccgcctgctctactggctcagcttcccgtcacacacacgagtgcaccgtgagtggagccgccagctgccgttccccgccgtcaccgtgtgcaacaacaaccccctgcgcttcccgcgcctctccaagggggacctctactacgcgggccactggctagggctgctgcttcccaaccgcaccgcgcgcccgctggtcagcgagctgctgcggggcgacgagccgcgccgccagtggttccgcaaactggccgacttccgcctcttcctgccgccgcgccacttcgagggcatcagcgctgccttcatggaccgtttgggccaccagctggaggatatgctgctctcctgcaagtaccggggcgagctctgtggcccgcacaacttctcctcagtgtttacaaaatacgggaagtgttacatgtttaactcaggcgaggatggcaagccgctgctcaccacggtcaagggggggacgggcaacgggctggagatcatgctggacattcagcaagatgagtacctgcccatctggggagagacagaggaaacaacgtttgaagcaggagtgaaggttcagatccacagtcagtctgagccgcctttcatccaagagctgggctttggggtggctccggggttccagaccttcgtggccacacaagagcagaggctcacatatctgcccccaccatggggggagtgccggtcctcagagatgggactcgacttctttcctgtttacagcatcacagcctgtcggattgactgtgagacccgctacatcgtggagaactgtaactgccgcatggtccacatgccaggggacgcccctttctgcacccctgagcagcacaaggagtgtgcagagcctgccctcggtctactggcagaaaaggacagcaattactgtctctgcaggacaccctgcaacctgacacgctacaacaaagagctctccatggtgaagatccccagcaagacgtcagccaagtacttagagaagaaatttaacaaatcggaaaaatatatctcagagaacattcttgttctggacatattttttgaggcgctcaattacgaaacaattgaacagaagaaggcgtatgaagttgctgccttacttggtgacatcggtggtcagatgggactgttcattggtgctagtctcctcacaatactagagctctttgattatatttatgagctgatcaaagagaagctattagacctgcttggcaaagaagaagaggaagggagccacgatgagaacatgagcacctgtgacacaatgccaaaccactctgaaaccatcagccacactgtgaacgtgcccctgcagacagctttgggcaccctggaggagattgcctgctgacacctctcaggcaacgcagcacctccaaacagaccttaaaggcccaagacctaggacaggagacagcaagcgcaggtgggatcgcccctgacgactgaaagaagcagagccccccatatgcacacattgcgaacttctgccaaacctcacctggccacatctgacatgaaccgtcccgggccctgcgtcatgtccctcgcaggaccgatgagtcgcactccggaactgtccaagaactaac

SEQ ID NO: 1068 - DNA, 2044 bp, Rattus norvegicus
  misc_feature (1)..(2044): n = a or c or g or t
ctaggtgcttctcaaccaggcctagtgacaggcnccacttcgccagcgcatctcagagcnctnnntcactgggtacnagcacctcgtctcggtgctggagaaggtgagtgggcctgggtgtcgccgccctgcagcctcaatttctatgcctgggtctccggaccgctcagggctgatatagaccttctgggccacaagccgggttagctgcggcggncgccaccgctgccnnnnnnctcgcgcactgccgcaagccggggtgcggggagacgaggttcagcacggccagggtgcggggatccggcccgggtttgggcagtggaccgaggaggcgggagccnncagccagcggaggggcgaggagcggaggagggaccgcaggggagaggagggagaaagaggaggggagcgaggcgagggggcggggagccgaggcgagaggcaggcggaccgtgggggaggcgactgggcaaggcgggatccaggcagtagagaggtgnnggcccggctgagtcgggagaaggctaccagactnnnnnngaagggcgagccagagctgccggtggggcggggcggggcggaagggtgcgaagcccggcacctgggcgcagatcacggcccggggagaccggccgcccaccggagaccgcagccgcncgccctccgctctgggatgtcggagcgatccaggcatccaggacgctgacggagcgagnccgaggatgggacggcgcccgcagctccggctcgtgaaggcccttctccttctggggctgaaccctgtgtccacctcccttcaggatcagcgctgtgagaacctgtccctgaccagcaatgtttctggcctgcagtgcaatgcatccgtggacctcattggcacctgctggccccggagccctgcgggccagttggtggtccgaccctgccctgcctttttctacggtgtccgctacaacacgacaaacaatggctaccgggagtgcctggccaacggcagctgggcagcccgtgtgaattattctgagtgccaggagattctcaacgaagagaagaagagcaaagtacactaccatgttgcagtcatcatcaactacctgggtcactgcatctccctggtagccctcctggtggcctttgtcctcttcttgcggctcaggagcatccggtgcctgagaaacatcatccactggaacctcatctcggctttcatcctacgcaacgccacgtggtttgtggtccagctcaccgtgagccccgaggtgcaccagagcaatgtggcctggtgtaggttggtgacagccgcctacaattacttccatgtaaccaacttcttctggatgttcggtgagggctgctacctgcacacagccattgtgctcacgtactccaccgaccgtctgcgcaagtggatgttcgtctgcattggctggggtgtacctttccccatcattgtggcttgggccattgggaagctgcactacgacaatgaaaagtgctggtttggcaaacgtcctggggtatacactgactacatctaccagggccccatgatcctggtcctgctgatcaactttatctttctcttcaacattgtccgcatcctcatgaccaaactccgggcatccactacatctgagaccattcagtacaggaaggctgtgaaggccactctggtgctcctgccccttctgggcatcacctacatgttgttcttcgtcaaccctggagaggacgaggtctccagggtcgtcttcatctacttcaactcttttctggagtcctttcagggcttctttgtgtctgtgttctactgttttctgaacagtgaggtccgctccgctatccggaagaggtggcgtcggtggcaggacaagcactccatcagagcccgagtggcccgagctatgtccatccccacctccccgaccagagtcagctttcacagcatcaagcagtccacagcagtgtgagctccaggccacagagcagcccccaagacctgaggccggggagatgatgcaagctcactgacgagccagtctgc

SEQ ID NO: 1069 - DNA, 1851 bp, Rattus norvegicus
  misc_feature (1)..(1851): n = a or c or g or t
ggccaactgcagagccagaagtgagagaggcagacagtgatgtccggagacggggtgtctcagcggagccagagcccttgacagagaaggctttgagagaagccagctctgccatcgacaccttaggcgaagccttggtggctggggcctattctaagatgtggtcctgtcgagaagatgcactgctggcattgtacaagaggctgatggagatgcctgttggaacccagaagggatttgtgaaaaacatgctcagagcatctgtctttctcatcagaagagccataaaggacattgtaacctcagtctttcaggcttcactgaaactgctgaagatgataattacacagtatattcccaagcacaagctgggcaaacttgacacaacgtactgtgtggagagagctatcccccttttacttgccagaactggagactcctctgcccgcctccgtgtcatggccttgaatttcatccaggaaatggccttgtttaaggaggtgaggtctctccagctcattccgtcttacttggtgcagccgctgaagaccaatgcttccgttcatctggcaatgagccaggtggacctcctggcccggctgctgagagacctgggcactgagggctcaggcttcaccgtggacaatgtgatgaagtttgcagtgagcgccctggagcacagggtatatgaggtgcgagagacagcagtcagaatcattctggacatgtacagacagcacccagccctcaccctggagcaccttcctccagacgacagcaccacacgcaggaaccttctctacaaagccatatttgaggggtttgctaagatagatggcaggccgaccgaggctgaaggcaagacccagaaaagagtagtcacaaaagaagcagaaaaacaaaagaaagaagagacgaaggctctacagggcctgtcagcagcaccaagagagacccaggctggagtccaggagaaggagaatgaggctgtgaagctcaagaatcaagaccctcaaggaaggaaagctgccccacctgacactccagaaatcccagataaccactatttggataatctgtgcatcttttgtggggagaggaatgagtccttcacagaagagggcctggacctccactactggaaacactgcctcatgctgaccagatgcgaccactgcaggcaggtggttgagatatccagcctgactgaacacctgctgacagagtgtgacaaaagggacgggtttgggaagtgcccccgctgcagtgaggctgtccccaaggaggagcttcctaggcacatcaaaactaaggaatgcaaccctgccaagtcggagaaggtggcaaaccgctgtcccctgtgtcatgagaactttgctcctggagaagaggcatggaaggttcatctgatgggctctgctggctgcacaatgaacctgcgcaagacacacattctctgcaaggctccagccccgcagcaagggaaaggcccaatggcgtcgaagtcaggcacctcagcacccaaggttggaagcaagatccccaccccaaagggaggcctcaaatcatgagtttctgcagaggtgactggcagacagtattgcanccacaaagctccacatctctgtgcttgattcagggaaggagctacgtacccccagcccttcataatatctaagtggatcactcctcaaaccttcacgtatagaataatatatttttattgttgctgtttgagggtttatgtgctaatttgccttgtgtacactaatacagtaaagatccgaaaggacaagagaaatggagcctccttaccataagtgctcccaaccaatttatgaaaaaaatccc

SEQ ID NO: 1070 - DNA, 1705 bp, Rattus norvegicus
gccggtgctgggctctgtagctcggtactccagcctctcgtcatggcctcggaaaagcctcaggacctaatggtcacctgcaccgcgccggtcaacatcgcggttatcaaatactggggaaagcgggatgaagcgctgatcctgcccatcaacccctccctgagcgtcacgctgcaccaggaccagctaaaaaccaccacaactgcggccattagcaaggacttcacagaggaccgcatctggctgaacggtcgtgaggaggacgtggggcagccacggctccaggcctgcctgagagagattcgccgcctggctcggaagcggaggagcacgggagacggggatgccctgcccctcagcctcggctataaggtgcacgtggcgtcagtgaacaacttccccaccgctgcaggcctggcttcctcagcagccggctacgcctgcctagcctataccttggcccgggtctacggggttgagggagacctctcagaagtggcccggcggggctcaggcagcgcatgccgcagcctctacgggggcttcgtggagtggcagatgggggaacaggccgatgggaaggacagcatcgcccggcagatagccccagagtggcactggccccagctccgagttcttatccttgtggtgagtgcagagaagaagccgacgggcagcacagtgggcatgcagaccagcgtggcgaccagtaccctgctcaagttccgggctgagtccattgtgcctgagcgcatgaaggagatgacccgttgcatccaagagcaggacttccaggccttcgcccagctgaccatgaaggacagcaaccagtttcacgccacctgcctcgacaccttcccgcccatctcctacctcaatgacacctccaggcgcatcatccagctagtccaccgcttcaacgcccaccatgggcagacgaaggtggcgtacacatttgatgcgggccccaatgctgtgatcttcactctggaggacaccgtggccgagtttgtggcggcagtaaggcacagcttcccccctgctgcgaatggagacaagtttctcaaggggctgcaggtggcacccgttcttctctccgatgagctgaaaacttcgctggctacggagcccagccctggtggggttcagtacatcattgccactcaggtgggaccaggacctcaagtcctagacgaccctcaccatcatctgctaggcccggatggcctgccacagcgggacctttgatctctcccatgtgcatctggagaaaggggttgctcccgggagctcgggagctcctgtgctgatgggccacgtccaaaggcttgcttgatgacacctaggggtgtctcctgtgatgagcagctgtctgggcagccggggacccctctcaagtgcctcaccttcctgctggctagccgaccttagggaagaggagtcggcgtctctcccaccgaagatgcccccgagggcctctaagcgtgaaggatgagggctcagacagcagtgcctctgttgagactcaggccacagtttctttgagaagcctcctggtgagggtaggggctgtggaacccacaggtagggtccattgtgggtgtggatgtaccacgaaggtgcagttgatggacccgatgaccacaggaataaagtgtgccactgctgcctgccaaaaaaaaaaaaaaaaaaaaaaaaaaaaacc

SEQ ID NO: 1071 - DNA, 1728 bp, Rattus norvegicus
aatctagcaaaatcaatccataatctctatttatttgttgaaaatgttgatcttaaccaaatcagtagtagtggtgcgtcttggatccaaaatgtggataccaaatatcaaatcagaatccagatacaagaaaaactccagcatctcagaacacagattcataatatagacattcaacagcttgctgcagagttaaaacaacagattgaagctcttgatgtcccaatgcatttagatcaactgagaactgcaattctattccaaagaataagtgtcattattgagcgtgtcaaatactttgttatgaatcttattgaagattttaaagtaactgagaaaatcaatacttttagagttatagtccgtgagttaattgagaaatatgaagtagaccgacaaatccaggttttaatggataaatcaatagagttggcccacagatacagcctgagtgagcctcttcagaaactaagtaatgtgctacagcaaattgagataaaagactactatgataaattggttggttttattgatgacactgtcgagtggattaaagcagtgtctttcaaaaatatcattgaagaactgaatagattgattgacatgtcggtaaaaaagttgaaagcctttgattatcaccagtttgtagacaaaaccaacagcaaaatccgtgagatgactcagagaatcaatgctgaaatccaagctctcgaactcccacagaaaactgaagcattaaaactgtgggtagaagacttcaaaaccacggtctccaactccctggaaaaactcaaggacaccaaagtaactgtggtcgttgattggctgcaggatggtttggctcaaataaaagcccaattccaagatgctttagaagatgtacgagaccgaatttatcaaatggacattcagggggaactggagcgctgcttgtctctggtaagccaagtttacagcacagtggtcacctacatttctgactggtggactctgactgctaaaaacataacagactttgcagagcaatattccacccaaaagtgggctgagagtgtgaaagcactggtggaacaaggattcattgttcctgaaatccaaacatttctggggaccatgcctgcatttgaggtcagtctccacgctctccaagaagctaactttcagactcctgactttatagtccccttgacagatttgaggattccatcaatttggataaacttcaaaatgttaaagaatgtaaaaatcccattgagattttccactccagaattcactctcctcaacaccttccgtgtccgttcctttacaattacgttgctggaaataaaagcaaagatcattcgaactatcgaccaaatgctgagcagtgagctacagtggcctcttccagaagtgtatttgagagccctggagatggtgaacatttctcttgcaagactctctctgccagacttccatgtaccagaaatcacaattccagaattcacaatcccaaatgtcaatctcaaagatttacaggttcctgatcttcacataccagaattccagcttcctcacctctcatgcacaactgaaatacctgctttcggcaaactacatagcgtcctgaaaatccaatctcccctctttatattagatgctagtgccaacatacagaacataactacttcagagaacaaagcagagattgtggcttctgtcactgccagaggagagtccaaattt

SEQ ID NO: 1072 - DNA, 1987 bp, Rattus norvegicus
tcttccaccatgattccctgcagagcagtgctgactttcgcgcgatgtctgatccggagaaaaattgtcacactggacagccttgaagattccaaactctgccgctgcttaaccaccgtggacctcatcgctttgggggttggaagcactctgggcgctggggtctacgtcctggctggggaagtcgccaaagccgattctggcccgagtatcgtggtgtctttcctcatcgctgccctggcctcggttatggccggcctttgctatgctgaatttggggcccgagtacccaagactggatctgcgtatctatacacttacgtcacggtcggagagctgtgggccttcatcactggctggaatctcatcctgtcatatgtcataggtacgtccagtgtcgcaagagcatggagtggcacctttgacgaacttcttaataaacagattggccagtttttcaaaacgtacttcaaaatgaattacactggtctggcagagtatccagacttctttgccgtgtgccttgtattactcctggcaggtcttttatcttttggagtaaaagagtctgcttgggtgaataaattttttacagctattaatatcctggtccttctctttgtcatggtggctgggtttgtgaaaggaaatgtggctaactggaagatcagtgaagagtttctcaaaaatatatcagcaagtgctagagaaccaccttctgagaacggaacaagcatctacggggctggcggctttatgccctatggctttacagggacgttggctggtgctgcaacgtgcttttatgcctttgtgggctttgactgcattgcaacaaccggtgaagaggttcggaatccacaaaaggcgatccccatcggaatagtgacgtccttacttgtctgctttatggcttactttggggtttctgcagctttaacgcttatgatgccttactacctcctggatgagaaaagtccactcccagtcgcgtttgagtatgtcagatggggtcccgctaaatacgttgtcgccgcaggctccctctgcgccttatcaacaagtcttctgggttctatgttccccttaccccgcattctgtttgccatggcccgggatggcttactgtttagatttcttgcaagagtgagtaagaggcagtcacccgttgctgccacgatgactgcaggggtcatttctgctgtgatggcctttctttttgacctgaaggccctcgtggacatgatgtctattggcaccctcatggcctactctctggtggcagcctgtgtgcttatgctcaggtaccaacctggcttgtgttacgagcagcccaaatacacccctgagaaagaaactctggaatcatgtaccaatgcgactttgaagagcgagtcccaggtcaccatgctgcaaggacagggtttcagcctacgaaccctcttcagcccctctgccctgcccacacgacagtcggcttcccttgtgagctttctggtgggattcctggctttcctcatcctgggcttgagtattctaaccacgtatggcgtccaggccattgccagactggaagcctggagcctggctcttctcgccctgttccttgtcctctgcgctgccgtcattctgaccatttggaggcagccacagaatcagcaaaaagtagccttcatggtcccgttcttaccgtttctgccggccttcagcatcctggtcaacatttacttgatggtccagttaagtgcggacacttggatcagattcagcatctggatggcgcttggctttctgatctatttcgcctatggcattagacacagcttggagggtaaccccagggacgaagaagacgatgaggatgccttttcagaaaacatcaatgtagcaacagaagaaaagtccgtcatgcaagcaaatgaccatcaccaaagaaacctcagcttacctttcatacttcatgaaaagacaagtgaatgttgatgct

SEQ ID NO: 1073 - DNA, 1977 bp, Rattus norvegicus
ccccctcccgcagctgtcctctgtagaaggcgggaccacccagagccctcaggaccgggattcccagrctccgggcgcaggcagccagacccccgagagtcctggttgtgcctccagctgcccagcggcgcctcgctccccatcacaagtttggtccatactggataagtaagctagtctgggataccgactgcttgtgccttaggagggtttggacatgccctggctggaagctttaccctacatctgtggatggctgattctccgtagctgtctcctggttggagcgcagctggattctgatggcaccatcactatagaggagcagattgttcttgttatgaaggctaaaatgcaatgtgaactcaacatcacagctcagttccaagaaggagagggcaattgcttcccagaatgggatggactcatttgttggcctagaggaacggcggggaaaacgtcagctatgccctgtccttcatatgtttatgatttcaatcacaaaggagttgctttccggcactgcactcccaayggaacgtgggattttattcatggctcaaataaaacctgggctaactattcagactgctttctgcagcctgatatcaacataggaaagcaagagttctttgaaaacctctacatcctgtacactgtcggctattccatctcttttggctccttggcagtagccattctcatcattggctatttcaggcggttgcattgcactaggaactatatccacttgcatttgtttgtgtccttcatgctgagagccaygagcatctttgtcaaggacagagtagcccaggctcacctgggagtagaggcactgcagtctctggtgatgcagggtgaccttcagaacttcattggaggaccatctgtggacaaatctcagtatgtggggtgcaagatcgctgtcgtgatgtttatttatttcttggctacaaactattattggatcctggtggaagggctctacctgcataacttaatctttgtgtctttcttttctgacaccaaatacctgtggggcttcatcttgataggctggggatttccagcggtatttgttgtggcctgggcagtagcacgagccactctggcggataccaggtgttgggaacttagtgctggagacaggtggatttaccmggmtccaatcttggcggctattgggctgaattttattctgttcctgaatacagttagagttcttgctacyaaaatttgggagaccaatgctgttgggcatgacatgagaaagcagtacaggaaactggctaagtcaacgctggtcctggtgctggtgtttggtgtgcattacatcgtgttcatctgccagccgcactccttctcggggctctggtgggagatccgcatgcactgcgagctcttcttcaactccttccagggattcttcgtgtctattgtctattgctactgcaacggagaggtacaggctgaggtgaagaagacctggactcgttggaatctgtccatcgactggaaaaaggcgccgccttgtggcggccacaggtacggctcggtgctcaccactgtcacacacagcaccagcagccagtcacagatgggaccaagcacacgcctggtgctcatctctagcaaacccgccaagactgcctgcagacagatcgacagtcatgtgactctacctggctacgtctggagtagttctgagcaggactgtcaaccacaatctaccccggaggagactaaaaaaggtcatgggcgacaggaagatgatagtccagtgggggagtcttccaggccagtagcattcaccatagacacggaaggatgcaagggagaatcccaccctatctgaatcaccatttgcagctcttgtggattggcggatctggctgtgtgggaggacctaagttggaagactggaattctgaaataaggcgtcgcttaaacatttccagtttctatgagtgggat

SEQ ID NO: 1074 - DNA, 1426 bp, Rattus norvegicus
ggcgctcaatggaccgatttccccggtttccctgaacccagcctagcccggaatgagaaattgcaaaatggcccgagtcgccagtatactagggctggtcatgctcagcgtggccctgctgattttatcgcttatcagctacgtgtccctgaaaaaggagaacatcttcaccactcccaagtacgccagcccgggggcgccccgaatgtacatgttccacgcgggattccggtcacagtttgcactgaagtttctagaaccgtcatttgtgcccattacgaattttctcacccatgaactccaagagaaaccttctaaatggacatttaatcggacagcgtttttacatcaaaggcaagaaattcttcagcatgtcgatgtaataaaaaatttttctttaaccaagaatagtgttcggatcggacaactgatacattacgattattccagccataaatatgttttctctattagcaataacttccggtccctgctcccagatgtgtcgcccattctgaataagcgttataacatttgtgctgtggtcggaaacagtggaatcttgacagggagtcagtgtggacaagaaatagataaatcggattttgtttttcggtgcaattttgccccgacagaggctttccacaaagatgttggaaagaaaaccaacctcacaactttcaatcctagcatcttggaaaaatattacaacaaccttttaaccatccaggaccgtaacaacttcttcctcagtttaaaaaagctcgacggggccattctctggatccccgcatttttcttccacacttctgcgactgtaaccagaaccttagtggattttttcgttgagcacagaggtcagttaaaggtccagttggcttggcctggaaatatcatgcaacatgtcaacaggtactggaaaaacaaacacttgtcacccaaacgactgagcacaggtttcctaatgtacacccttgcatctgcaatatgtgaagagatccacttgtacggtttctggcctttcggatttgaccccaacaccagggaggatctgccctaccactactatgacaaaaaaggaaccaaatttaccaccaagtggcaggagtctcaccagctgcctgctgagtttcagctgctctatcgaatgcatggggaagggctcacaaagctcactctgtcacactgtgcctaagaactccaaatggaaagtgccaaatggctgtttaaaaagtgcccccaaaccaaattgaatagtctccagaacagaacccatagacaatctggcaaagcctgtctgccacttacaaggaaagatatcttctcttcctcttttgcactgctctttgaatggtccgaacagacttaggacaggtgcattgaagccgtttcttttagacttgactgggaaaaggttatattgcat

SEQ ID NO: 1075 - DNA, 2515 bp, Rattus norvegicus
ctgctgtgggggccggcttggagtgggattcgacccgcggcgctgaccgagtgctggaccgacggctgtcgggcacccgggcctgcgcgcactgctgctccgggtcgccccggccgaggcgctggccacggtagacctcagggagggctcgggctgccgggccgggcgccatgtccatggaggaccccttctttgtagtgaaaggagaggtacagaaagcagtcaacactgcccagggattgttccagagatggacggagcttctgcagggcccctccgcagcaacgagggaagagatcgactggaccaccaacgagctgaggaacaatctccgcagcatagagtgggatctggaggacctggatgaaaccatcagcatagttgaagcaaatcctagaaaattcaacctggatgcgactgaattgagcataagaaaagccttcatcacaagtactcggcaaattgtcagggacatgaaggatcagatgtcagcttcatctgtgcaagcgttggcagaaaggaaaaacagacaggcgctactaggagatagcagcagccagaattgggatgctggagtgacggatcgatatgggcgccttgatcgggagctgcagctggccaactcccatttcatcgaggagcagcaggcacagcagcagttgattgtggaacagcaggatgagcagttggagctggtctctggcagcatcggggtgctgaagaacatgtcccagcgcatcggaggggagctggaggaacaggcagtcatgctggatgatttctctcacgagttggagagcactcagtctcgactggacaacgtgatgaagaaacttgcaaaagtgtctcacatgaccagtgatcggcgccagtggtgtgccatagccatcctcttcgcggtcctgctggtcgtgctgaccctcttcctagtgctgtgatggtggtcgccttggcgcttctgcacgaggacccagggaagaggagcagcaagcactcggccacttacattcctctcccagaaacacacctccgccctgcttcctctgtgactccggcatcgggacagccttctctcccagcgttcaaagggcaggcttagaagaaggaggaggtgaccacatgcccggctggacagcagaagcccttggctgccccaggaagctgaggacagcaagcccctgctttgccttactggacctcgctccttgaggaaggaaggaaggaaggaaggaaggaaggaaggaaggaaggaaggaaggaaggaaggaaggaaggactccgagtcatcagaagaactaacagccccacttactccgttgctcattctgctggtctctggcagtctttctttctactcagaccctttccctgcttagatgggtgccactctcccttcagaagaggcctggcaagaatgcgggcgtctagggtgtatgtttcccattgctgtttgtttcttagcccgagagctggctgctgctgaggacagaaggctcagaatcacttcgtgacagaaatgcagtgtttcgttttgctgggtaagagctgagattaaattgcttttccgggtgtctttgtggcagggataagcaataggaaatagtgaaatccctggggattggggtgcagatgacaaaaggctttaaaggactggggcagttgagaacagcagcacctgcgttggtctagcctattggaagggctggtgatctctctcaaggcctggacagagcaccaacctggtctgtcccagggctctctctccagaggtgcagcttgcatacgtagagccctcatacagtgtggagcagcatacaccactcggccaggcgggcatggcttcttctctgatgcgtattccgatggctctcagacgaggtcgaagggtcagcacagctaccacatctgtgcagaacccgttctgacacagaaagctgcttctgggccagcggtccttactccatgagtaataggatggaggtaagagagcttgtactccgttctctaaggtgacaacttgacttcatcatccattggaatcactgagggagtccaaattcactgacagatgcttcattgggttgaagtagctgaaactgctgacactccacttggggctttgggcctcagatgtgcagatgtatgtgggatttcttatactgtcccaaatgcatggcctggtattgaagtagctgtcaggtccagagccagcctttcacactggggctgccgctcagtcttctgtgcaggaagagcagcgtctggacagtttgatctttgacctctcttgctttgcctttctgtgcattccttagcatgccaactttaaaaagagccctgggttgttcatatgccttgggatttcgacttttgggccttttttgtttgtttattatttccaatgatgtgcttgcccaggtaacttttaaattgcacttttaaataaatatttgtaacaatttttaaaaaaaaaaaaaaaaaaaaaaaaaaaaaaaaaaaaaaaaaaaaaaaaaaa

SEQ ID NO: 1076 - DNA, 2011 bp, Rattus norvegicus
ggcacgaggcggcggcggcgcctggaggggaccagtgcggcggggagatgacggggacctaaagaggaacgaacaccgggagaggccgccaagtgcggcctgaggacaggcgcgcctgtcgactcagcgccaaacagggagagcccattacgtgactctgtcccgagggcctgggctcccagcccttgtactgcgcaaaactgggcggtgagagccggctgccggcgcgctgttgaactttgttttctctagagcgtggacctcggagccctccaggcagctgcttgccttgaaaaatgctggaggctgggcgggggcccaggcccgggaacctgttcttcctgtttcctgcctcagtcccagtagctggtccaggcctgtgcacatgcgagtgaagaactggaacggacgctgagcatccaagagcacctgctgcagcacctgctgtcacaccaagagcaggagctgatcgggtccagggcaatggcagcaggcctggactcctggaatagtaccatcaatggcacctgggagggggacgaactgggttacaaatgtcgcttcaacgaggacttcaagtatgtgctgctgcccgtgtcctatggcgtggtgtgcgtgctcgggctgtgcctgaacgtcgtggccctctacatcttcctgtgccgcctcaagacctggaacgcctccaccacctacatgtttcacctggcagtttctgactctctctacgcagcctccctgccgctgctggtttattactacgcccagggtgaccactggccatttagcacagtgctctgcaagctggtgcgtttccttttctacactaacctctactgcagcatcctcttcctcacctgcatcagcgtgcaccggtgcctgggggtcctgcgccctctgcactccctgagctggggccatgcccgctatgcccgccgagtggctgcggttgtgtgggtgctagtgctggcctgccaggcacccgtgctctactttgtcaccaccagcgtgagagggacccgaatcacctgccacgacacctcggcccgagagctctttagccattttgtggcttacagctctgtcatgctgggtctgctttttgctgtgcccttttccatcatcctggtctgttacgtgctcatggcccgacggctgctcaaaccggcttatgggaccacaggtctgcctcgggccaagcgcaagtctgtgcgcaccatcgccttagtactggccgtcttcgccctctgcttcctgcctttccacgtcacccgcaccctctattactccttccgatcacttgacctcagttgccacaccctcaacgccatcaacatggcgtataagatcacccggccactggccagcgccaacagttgccttgaccctgtgctctacttcctggcagggcagagactggtccgctttgcccgagatgccaagcccgccacagagcctacacccagcccacaggctcgtcgcaagctggggctgcacaggcctaacagaactgacactgtgaggaaagatttgtcgatcagcagtgatgactcaagaaggacagagtccacaccagctggaagtgagactaaggacattcgtctatagcagctcagtcaggtgtcagttcatgtaggggagagctgtaggggaccaaagcttgttcaaaggggctgatatcctctgatatgatatcaacggctctcatttggcagggactcaggatactcatcctgtggtcccaagagtgacaggaccccaaagtccccaatcatttgtatgtgtgagttggggaatcgtatctaaggcaacgccacctgactcccatgcaaacagctgccattcctgccaaggtacctaggccgagcttcagcctcttaaatccaagggagaagcaggcccagggagaacacagcagagtccagactagctacctggattagaagtagaatcgcggggttggggatttagctcagcggtagagcgccctgggttcagtccccagctccgg

SEQ ID NO: 1077 - DNA, 1250 bp, Rattus norvegicus
gccatggtgaacgaagccagaagaagtggaagccccagccccccttctgagggtagaagaagtggaagtgagagttccaaggacagttccagatgttccacccccagcctggacccggaccggaacgagagactgcgggagaagatgagacgaagaatggactctgaagacaagtggttctccctggagttctcccctcctcggacaggtgagggagcttttacctcatctcgaggtttgaccggttggggggagggggcccctccttcgtggatgttacctggtacccaggtggcgtcctggctcagacaaggagacctcatctatgataattgccagcacagcactgaactactgtggcttggaaaccatcctgcacatgacctgctgccagcagcgccaggaggagatctcaggccacctgcacagagccaagcagctcggcctgaagaatataatggcgctgaggggagaccctgtaggtgaccactgggaagcagaggaaggaggcttcagctatgccacagacctggtgaagcacatccggaacgagtttggagactattttgacatctgtgtggcaggttaccccaaaggccacccggatgcagagagcttcgaggatgacctgaagcacctgaaggagaaggtatcagcaggcgccgactttatcatcactcagctcttctttgagggacgctccttcttcagcttcgtgaaggcctgcgaagacataggcatctcctgccctatcctgcctgggatcttccctatccagggctacacctcccttcggcagcttgtaaaactgtccaagctggaggtaccacagacgatcaaggatgtgatcgagccgatcaaagacaacgatgctgccatccgcaaccacggcattgagctggctgtgaacttgtgccgggaactgctggacagtggcttggtgccgggcctccacttctacactatcaaccgcgaggtggcgaccatggaaagtgctgaagcaactgggcatgtggaccgaggaccccaggcgtcccctgccctgggctggcagtgcgcaccccaaacgcagggaggaagatgtgcgtcccatcttctgggcctcacgaccaaaaagctacatctaccgcacacagggctgggatgagtttcccaatggccgctggggtaattcttcctcaccagccttcggggagctgaaagactactacctcttctacctgaaaagcaagtcccccaaggaggaactt

SEQ ID NO: 1078 - DNA, 880 bp, Rattus norvegicus
cctgggaggatgccaccagtcctgatactcctgaccctacttctgcctcttggagccagagcagaggagatcatcggaggcaatgaggtcagtccgcattcccgcccctacatggcatattttgagtttctcaatgataacgggaagaagacgttctgcggaggcttcctggtgagagacaacttcgtgctgacggctgctcactgcagaggaagatcaatgacagtcacactgggggcccacaacatcaaggctaaagagaagacacagcagattatccctgtggcaaacgccactccccaccctgcctataatcctgataaacgttccaatgacatcatgctattaaagctggtgagaagtgccaagaggactagcgctgtgaggcctctcaacctgcccaggcgcaatgcccatgtgaagccaggagatgtgtgctacatggctggctggggaaagataaccccacagggggaattccccaacacactgcgggaggttgagctgacagtacagaaggatcgggtctgtgagtcccagttccaacgttcttacatcaaagcgagtgagatatgtgtgggagactcaaagaccaagggagcttcctttgaggaagattctggagggcctcttgtgtgtaaaaaggcagctgcaggcattgtctcctacgggaaaactgatggatcagctccacaggtcttcacgagagttttaagctttttatcctggataaagaaaactatgaaaaacagctaaatacaagaagcagcatggatcatttcctgactaaccatcttccctatagctgagtccaggagtgctctaggacagatggcagcaactgaataaagcacttttttctgactggaaaaaaaaaaaa

SEQ ID NO: 1079 - DNA, 883 bp, Rattus norvegicus
tgggaaggtgctaccagttctcattctcatgaccatacttctgcctcttgaagctggagcagaggagattatcgggggccatgaggtcaagccccactcccgcccttacatggcacatgtgaaatttgtgaaagttgatgggaatagaagtgtctgcggaggcttcctggttcaagactactttgtgctgacggctgctcactgcactggaagatcaatgaaagtcatactaggggcccacaatctccatgtgcaggagaagactcagcagatcatccctgtgaaaagggctattcctcacccggcctataatcgtgaggaccacattaatgacatcatgctattaaagttggagagtaaagccaagaagactagagctgtgaggcctctcaatttgcccaggcccaatgacatggtgaagccaggggatgtgtgtcgtgttgctggctggggccaaatgtccgtcgatgtcactaaaagaacttcccgcctacaagaggctaaactgatcatccaggaggacaaggaatgcaaaaaactcttccatcactactctgagaccacggagatttgtgctggagacccaaagaaaatacaggctgcgtacaagggtgactccgggggaccccttgtgtgtgaaaacagagcttatggagttgtatcctatgggaaaaatgggacaatctcttcaggagtcttcaccaaggttgtgtacttcctgccatggataagcagaaacatgaagctcctctaacagttaacacctgtgcccaaccagcctttctgacctcaggcaagaaccacgatgagtgtgcgtcaaaggctgaaaatccgtaataaataacccccagtgtgcatgtaatttaagtaaaaaaaaaaaaaa

SEQ ID NO: 1080 - DNA, 2615 bp, Rattus norvegicus
ccagccccgcgttccgctcgttgccgccgcccgcgctcgcgccgccccgcatcccggtcaccagttcaggagacaaagacacagcctcccacaatgtcctacagacgagagctggagaaatatcgagacctggatgaggatgaaatcctgggggccctcacagaggaggagctcaggacactggaaaacgagctggatgagctagaccctgataatgcactgctccctgcaggcctgaggcagaaggatcagaccaccaaggcacccacaggcccctttaaaagagaggagcttttggaccacttggaaaagcaagcgaaggaatttaaggaccgagaagacctggttccctacacaggggagaaacgaggaaagatctgggttcccaagcagaagccaatggatcccgtgctggagagcgtgacgctggagccggaactggaggaggccctagcaaatgcctcagatgccgaactatgtgacattgcagctattctgggcatgcacacgctcatgagcaaccagcagtactaccaagccttgggcagcagctccatcgtgaacaaggaggggctcaacagtgtgatcaaacccacacagtacaagcctgtgcctgatgaagaaccaaattcaacagatgtagaggaaacgctggagcgaataaagaacaatgacccagaacttgaagaggttaatcttaacaacatccggaatattcccatacccactctcaaggcgtacgcggaagccctgaaagagaactcctacgtgaagaagttcagcatcgtggggacccgcagcaatgaccctgtggcatttgctcttgctgaaatgctgaaggtgaacaaggtgttgaagacgctgaatgtcgagtccaacttcatctccggagctgggatcctgtgcctggtggaagctctcccccacaacacttctctggtcgaactgaaaatcgacaaccagagccagcctttgggcaacaaagtggaaatggagatcgtgaacatgttggagaaaaacacaacactcctcaaatttggctaccactttacccagcaggggccccggctgcgggcatccaacgccatgatgaacaacaacgaccttgtgaggaagaggaggctcgcagacctgacggggcctattattcccaagtgccgcagcggtgtctagtgcgcaaagggacgcccacgcctatgaactggacgtgttctaccgataatgtgtgttccccagtggagaccaggaggcaaatgttggcgtgaactcttgtggttcagttctttgtgcactaaggtttagggtaactagtgactgtagttggaccttttataaaatatggttaatgtgaaggttttctttagtcacagaagttcagtctgataattatttaaaaatgcagaagccctcaagctggcaggccttgctgcagacagcgtgacactggcagagacagcccaggggcccttggcggccgtgctttggtgcttaggtgcacttacaacatgaatgcatcagcacacaacacttcccacctagtttggaagcatggtgaaacaatttatttcagatttgagcatagcagctcagtaaaagaacatagattcatgatttttcaaccccacttgaaacgttaaaatcaagattaaagctgccaaattgattccaggatcaagtccccaccccctaagaatgaaagacaagccccagaattttctaagaatcagaaagacacaggattccttctgccaggtaagagaaagggggagaaaaaggcaatagtggaattgagtttcaaaacctaccacgccaagcaacagacatgagtgctgtgtgaacacctgggaggttctcatctgtagtcagaaatcatttcttctttattgaatgccaacttcatgatggatgaaaacttacaaccacataaaaacatcttccaataccgcagtgagccaacggcttatgtgagatcaacaccattgggtgaatttccagtccaccatgcctgtggtatttagcatggccctgcttacagacaccaagtgcctgcccggtcacttaggagacaaatcaaatcacacacgaagcctctgaaggacagcagagtacaacatcccaatggtaaggaattaggagatcctggacatacaacacaaggaattattctgaaacctaatcttggcattcctactggatccctttaacaccatgggagccagtaaaaatgttaaaatacactgttcttgtgccttttaatagaccacagtgccagttaaactagtacttttgttgctttggggagtgttttccttagggattcagccgatatgacagtgatggctcaaaagctgcagagcacagccaggggcttctgacctaagacctgcacaccggactgtaaggccatggacagcacagggtaactagagtggcatcggggcctcagcactgtgagtggtcactgaggcccaggagtggcaccaagctgcagggacagccagctccactcagcttctccttgaaacacaactgcagctgcattctgcatcactggaaactgcaaaataatattaaagccatttggtgtatgtaaaaaaaaaaaaaaaaaaaaaaaa

SEQ ID NO: 1081 - DNA, 2230 bp, Rattus norvegicus
gaattcgggcagaccctcggtctccaaagctacatagacacttggattcaagagggcacgagaaaagggggtcttggtgatcctcccagtacaccccagaaagccaggacacccctggcagcaccactccttcagggtcagccttagtgccctgtccaagagcactgctgtgaccacagggctgcaggtaccaggacaaaaggcctagttgctctcagagagccagtactgtcctaggcccagagctgattcgactctgaaactggggcaaggaagggtcaggatggacagtggggatggaagggggagctccccaaatgtccagggcagaagaacagcaagtctccatggagagagccacactgttcctttccgtgctgatagcccagggagaaggcagccggaggagggccacccaggcccacagcaccacccagcctgctctgctgaggctgtcagatcacctcctggctaactacaagaagggagtgcggcctgtgcgggactggaggaagcccaccctggtctccattgatgtcatcatgtatgccatcctcaacgtggatgagaagaaccaggttctgaccacctacatatggtaccggcagttctggaccgacgagtttctacagtggactcctgaggacttcgacaatgtcaccaaattgtccatccccaccgacagcatctgggtccctgacatcctcatcaatgagtttgtggacgtggggaagtctccaagcattccttatgtgtatgtgcaccatcaaggtgaagtccagaactacaagcccctacagctggtgaccgcctgtagccttgacatctataacttcccgttcgatgtgcagaactgctctctgaccttcaccagctggctgcataccatccaggacatcaacatttccctgtggcgaacaccagaagaagtgaggtcggacaagagcatcttcataaatcagggcgagtgggagctgctgggggtgttcaccaaatttcaggagttcagtatagaaaccagtaacagctatgcggaaatgaagttctacgtggtcatccgccggcggcctttattctacgcagtcagcctcttgctgcccagtatcttcctcatggtcgtggacattgtgggcttttgtctgcccccggacagtggtgagagagtgtctttcaagatcacgctccttctgggatactcagtctttctcatcatcgtgtcagacacactgcctgcaacggccatcggcactcccctcattggtgtctactttgtagtgtgcatggctctgctggtgataagcctcgctgagaccatcttcattgtgcagctggtgcataagcaggatttacagcgccctgtacctgactggctgaggcacctggtcctagacagaatagcctggctgctctgcctaggggagcagcccatggcccataggcccccagccaccttccaagccaacaagactgatgactgctcagccatgggaaaccactgcagccatgtcggaagccctcaggacttggagaagacctcgaggagcagagatagccctcttccaccaccaagggaggcctcgctggctgtgcgtggcctcttgcaagagctgtcctccatccgccactccctggagaagcgggatgagatgcgggaggtggcaagggactggttgcgggtgggatatgtgctggacaggctgctgtttcgcatctacctgctggccgtgctggcttacagcatcaccctggtcacgctctggtccatttggcattattcctgagtgggtacagcctggcagggaggggatgtgagtcctgcatcctgtttccaacaccaattcatctgagcaaccccagtccccttgtcccctaaacttagcactgaagacccggtcagaccccccgacttcgctatcatggctttaaagcatgatatcctagatcaagaggaaccaagactcctctaacttattaagacatcaagccctggttccttttccagtacttctgtgattatggcccttgggatggctcatttccacagtttttttttcctttttgatcagaggaaagcaaattctcttgcctaggtgcctgagacgtctgtgcctgttttatccaggccccagtggcttcttcttcagctcacttgtgggtacttccctagcgctcagcctcatcaaccaacggggggaggggataataaaatgctatgatatcccccgaattc

SEQ ID NO: 1082 - DNA, 540 bp, Rattus norvegicus
ggaggtgcggctgccatggcgcggaatgtgttgtaccccctctaccagctgggcggccctcagctccgtgtgtttcgaactaacttcttcattcagttggtgcggcctggtaccgcacagcctgaagatacagtgcaattccggatccccatggagatgaccagggtggaccttcgaaattaccttgagcagatttacaacgttcctgtggctgctgtgcgcacacgggtacagcatggctccaacaggaggagggaccataagaatgtgaggatcaagaaaccggactacaaagtggcctacgtgcagctggcccacgggcagaccttcactttcccagatcttttcccagaaaaggaacccacttctccagaccctctggaagaggagctaccccagcagaggcaaagcagcgacccacggtgccctggtatcccttcctggtttggcctatgacctctgacagcaggttctgggccacagaccctagtgagcacagtggttctgacaagcccaaataaaaattttttgtggagaaag

SEQ ID NO: 1083 - DNA, 2463 bp, Rattus norvegicus
gaagcagcagcagcagcagcagcaacaacaacagcagcagtagcagcagcagcagcagcagcagcagcagcagcagcagcagcagccaccgccgccgcttgccagccagccacacagccacacaaaaattcctcctcaaatcctcacctaagctttcagtatatccagatccacatcttcactcaagccgggagagggaaagaggaaagggggggaggaaaaaaaaagccaacaacttagcggaaacttctcagagaatgctccaaaactcagcagtgattctggcgctggtcatcagtgctgctgcagctcacgaggcggaacagaatgattctgtgagccccagaaaatcccgggtggcggctcaaaattcagctgaagtggtccgctgcctcaacagtgccctacaggttggctgtggggcttttgcatgcctggaaaactccacatgtgacacagatgggatgtacgacatttgtaaatccttcttgtacagtgctgctaaatttgacactcagggaaaagcatttgtcaaagagagcttaaagtgcatcgccaatgggatcacctccaaggtcttccttgccattcggaggtgttctactttccagaggatgatcgccgaggtgcaggaggactgctacagcaagctcaatgtttgcagcattgccaagcgcaacccggaagccatcactgaagtcatacagctgcccaatcacttctccaacagatactacaacagacttgtccgaagccttctggaatgtgatgaagatacggtcagcacaatcagagacagcctgatggagaagatcgggcccaacatggccagcctcttccatatcctgcagacagaccactgtgcccagacacaccccagagctgacttcaataggaggcgcacaaatgagccacagaagctgaaagtcctcctcaggaacctccgaggtgagggggattctccctcacacatcaaacgcacctcccaagagaatgcgtaagcagggagaggtattcacagcctcaccaaactaatagcgttttaggggtgtttacacaccaactttgagtgtactgtgcctggtttgatttttttttaagtagtacctattttctatccccccttaaagaaaactgcatgaaactaagcttccatgatcaatatcccaatattctgcaatgacagcattcttagcaatagaatacatgtggtcattctgcctcttctggagagagaatgtaccctcttccatcccccctctctctcaattctttttcaagatccccatctactctctgcaaacacaaaacattcatgtaactgcccagtcattgtaatctgaagatgtaggtccctttagaatggtcacccagtagagttagccaatacaaaacaactttatttaaatgcatgtcttaaatgctcataaatatgttaaatggaattcgtgttatgaatctgtgctggccatggacgaatatgaatgtcatgtttgaattcttgatctctaatgagtcttatggtctcaatcctccaatgtctaacttcctttctgacatatttaccaaattgctcaaacctggttctccaaccagattttgagccagcatcttcttgcatctaatgaaaaacaaaaagctaacatctttatgtactgtaactgctcagagctttaaaagtatctttaacaattgtcttaaaaacagagaatcttaaggtctaactgtggaatataaatagctgaaaactattgtactgtacataaattccagaggactctgcttaacagagcagtctataataactttattgcatatagatttagttttgtaccttagctttattttccttttcctgggaatggaataactatctcacttccagatatccgcgttcatgctccttgtggccttttttataactaagggggtagaagtagttttaactcaacatcagaacttaagatgggcctatacttgataggaaaacccaacaggttatctgaaggaccccaggtgagatatcaatctcccagcccagctcaacccagaggctacatttgacttagatgtatcctgaaacagctctgtcacagccaactgggaattacaggaatcaaagagatcatccctctgggctttgatcacttagtgtgacaaggcctactatccccttggaagtggcagttcttggctcattgccttccatcaatgcctggcactctggtaaatgatggaatgggatattgttccactaagccaatcaggaatgagtcaatcagcctttgggtctttagtcctgggaacttgggcttaagggggtataaataaccctgggctgtccagccttaatagactcctcttacatcttttgtcctgtaacacgctgcctgccaaagtagtcctggcagctggaccatctctgtaggatcttaaaaaaaaaaaaaaaaaaaaaaaaaaaaa

SEQ ID NO: 1084 - DNA, 1344 bp, Rattus norvegicus
cgggggtagtcatggcggctcggtgcgtgaggctggcgcggcgcagcctcccggctttggcgctgtcgttcaggccttctcctcgcttgttgtgcacagctacaaaacaaaagaacaatggccagaacctggaagaggacttggggcattgtgagccaaagacagatccatcctctgcagacaagaccctcctggaagagaaggtgaagctggaagagcagctgaaggagaccatggaaaaatacaaacgtgctttggcagataccgagaatctacggcagagaagccagaagctggtagaagaggccaagttatatggcatccagggtttctgcaaggacttgctggaggttgcagacatcctagagaaggcaacccagagtgttccaaaggaggaggtcagcaacaacaaccctcacctgaagagtctttatgaagggctcgtgatgactgaagtccagattcagaaggtgttcacaaaacacggcttgctcaggcttgaccccattggggcaaagttcgacccttatgaacatgaggccttgttccacacccctgtggaggggaaagaaccaggcactgtggcactagttagtaaggtgggctacaagctgcatggacgcaccctgaggccagctttggtgggggtggtgaaggacgcttagctctctccctcaaggctctggactttgtaggtcacttgctagaactcaaagggtgggcgggcttgtaatttctcatctgtgaacacatctgacccttgcccagccttgttggaaatcttaagtaagctaagcagaacatgaagctgcttgcacactgtgtcagagactctgggagtctggtcattgagtttagcattacctacttcagaagagggccagcagggcctcaggagtagcatgctaacgttgtatctgttccaccttgtgattaagtactttacacaaataaaaggtctttggctacatctgtgctgcacagtctacctctgagtgccaaggcgctggtgtcactcaggcggtggtcctccctggaagccgggaagggccagaatgggaacacttgttgccagcaaagctaagacgttcaagagcacattccttccaaatactgggctttctatgcctgcccttgctctgaaatgacagagtcctggtgtatttattaatgagctccttgcattacagctgggcggggttcatcaaaacagggttctattttgactgtaaaactgcgtggctggcatgctttagacatttccactcaggaggttgtggttaagggaattaaaaggctcatcttttatcttccaaaaaaaaaaaaaaaaaaaaaaaaaaaaaa

SEQ ID NO: 1085 - DNA, 1895 bp, Rattus norvegicus
gggaggccccgctgccactagagccaaccgcgcacttccgaaggtgtcgcggctggcctcccctcccgccgccccgggaacttcaaagcggcccgcgctgcgtgccgctctgggaccccgaagccttgcaccgccgcggggtggccatgaccccagcaagccgctccgcactgagcctggccctcctgctggtggcactggcctccgaccttgcggcaggactgaagtgtgtgtgtcttttgtgtgattcctcaaactttacctgccaaaccgaaggagcatgctgggcctctgtcatgctaaccaacgggaaagaacaggtgatcaaatcgtgcgtgtccctcccggaactaaatgctcaggtcttctgtcacagttccaacaacgtgaccaagaccgaatgttgcttcacagacttctgcaacaacatcactctgcaccttcccacagcatctccagatgcccctagacttggccccacagagctgacagttgttatcactgtacctgtttgcctcctgtccatcgcagccatgctaacgatatgggcctgccaggaccgccagtgcacatacaggaagaccaagagacacaatgtggaggaaccactggcagagtacagccttgtcaatgctggaaaaaccctcaaagatctgatttatgatgccactgcctcgggctcaggatctggcctgcctcttttggttcaaagaaccatcgcaaggacaattgtacttcaagaaatcgtaggaaaaggtcggtttggggaagtgtggcacggaagatggtgtggagaagatgtggctgtgaaaatattctcctccagagatgagagatcttggttccgtgaggcagaaatttatcagacggtaatgctgagacatgagaatattctcggtttcatcgcggccgacaacaaagataatggaacctggactcagctttggcttgtgtcagagtatcacgagcagggctccttatatgactatttgaatagaaacatagtgaccgtggctggaatggtcaagttggcgctttcaatagcgagtggtctggctcacctacacatggagatcgtgggcactcaaggtaagcctgctattgctcaccgagatataaagtcaaagaatatcttagtcaaaaagtgtgacacttgtgccatagctgacttagggctggctgtgaaacatgattctatcatgaacactatagatataccccagaatcctaaagtgggaaccaagaggtatatggctcccgaaatgcttgatgatacaatgaacgtcaacatctttgagtccttcaagcgagctgacatctattcggtggggctggtttactgggaaatagctcgaaggtgttcagttggaggacttgttgaagagtaccagttgccttattatgacatggtgccttcagatccttccatagaggaaatgaggaaggtcgtttgtgatcagaaactccgaccaaatctcccaaaccagtggcaaagctgtgaggcgctccgggtcatgggaagaataatgcgtgagtgctggtatgccaacggggcagctcgcctgaccgccctgcgcgtgaagaagaccatttctcagctgtgtgtcaaggaagactgtaaggcctaaggcgcatacaggcgacgggaaagccctcaccactctctttcatgtctcctgctttgtgtaaatgttttcgtttcttttctgctgtgttttgttttagttctacctcaaagatgattcactacagtgttgaagtgtccaaaggcagcatgaaaagataactctaagcatgggcaggtcttgactttcccagtttccatgttgtccgtacttttatttttaaaggtgacactattcatttttctttttatttaaggaggaagatgttat

SEQ ID NO: 1086 - DNA, 1322 bp, Rattus norvegicus
cctccacccgaaaccaggatggcggtgtctgccttccagctgtggcgtgcgggcgggctgctaagaagaaacttcctgactcactcgtcttcttggaaaatccctcctcgtgtcctcaaatcctcacaaccagaagctctactcagtgtaacaaataatgccctatgtttcgcacctctgcagacatttactgatgaggatattatgatgcagaaggcagtcaaaaaatttgcacaggaacaaattgctcctttggtttcaactatggatgaaaattcaaaaatggagaaatcagtgatacaaggattattccaacaagggatgatgggcattgaagttgaagcaaaatatggaggaacagaagcctccttcttgtgctctgtcctggtgatagaggaactagctaaggtggatgcgtccgtggctctcctatgtgacatccagaacacagtcattaacaaactgtttaggaagcacgggacagaagaacagaaggccacctatttgccaaagctggttacggaaaaattagggagtttttgcctctctgaagctggagctggtagcgactcttttgctttgaaaacaagagctgataaaagtggaaattactacgtcatcaatggatcgaagatgtggatcagcaatgctgaacatgcagagctcttcctggtttttgcaaatgtggaccccccctctgggtacagaggcatcacctgcttcttagtagaccgagatacagaaggttttcaaatagggagacgagaaaacaaaatggggatcagagcttcttccacctgtcagttaacatttgaaaatgtcaaggttccagaaaccagtgttttggggaaaattgggcacggttataaatatgccataggaagtcttaacgaaggtagaattggaattgctgcccagatgctaggactggcccaaggatgttttgactacactattccatacataaaagaaaggatgcagttcggcaaacgaatatttgattttcaggggctccaacaccaagtggctcacgtggccacccagctggaagctgcgcggttgctgacgtacaacgctgctaggcttgtagaagccgggaggccatttataaaagaagcatctatggccaagtattatgcatcagaggtcgctgggctgacaacaagcaagtgcatcgagtggatgggaggggtcggctacaccaaagattaccctgtggagaaattcttccgcgatgcgaagatcggtacaatatatgaaggaacttccaacatccagctgaacaccattgcaaagcacatcgatgcagagtactgacgtct

SEQ ID NO: 1087 - DNA, 1150 bp, Rattus norvegicus
cgcacgctggcagccggcgcgatggcggcagacggggactggcaggatttctatgagttccaggagccggccgggagtgtccgggaccaggagaactgtaacgcgagcccggaggctggagcgggggcacacgcgggcggcgacagcttcccggcgctggcttccagcctggaggagaagctgagcctgtgcttccgccccacgtcggacgccgaccccccgcgggcggccgtgcggcccatcacggagcgcagcctcttgcaaggggacgagatttggaatgccctgacagataattatgggaatgtcatgcctgtagactggaagtcgtcccatacgaggaccttgcatttgcttactctgaacctcacagagaaagggatgagtgatggccttcccttcgacacctcagatgaggaggagctgagggagcagctggatatgcattcaatcattgtctcctgtgtcaacgaggagcccctcttcactgcagaccaggttattgaagaaattgaagaaatgatgcaggagtcaccagacctagaagacgatgagacccccacacagtcagaccggctctccatgctctcccaggagattcagactctcaagagctctagcatgagcagctgtgaagagcgagtgaaaaggctgtcagtgtctgagctaaacgaactgctggaagaaattgagacggccattaaggagtactctgaggagctagtgcagcagttggccctgagagatgagctggagtttgagaaggaagtggagaacagctttatttctgctctgattgaagtgcagaacaagcagaaagaacacaaggagacagccaagaagaagaagaagctcaaaaatggcagctctcagaatgggaggaatgagagaagtcacatgccaggcacacgcttcagcatggaagggatctcaaatgtcattcagaatggcctccgccacacctttggaaactcaggtggagagaaacagtatttgacgacagtcatcccttacgagaaaaagaatggcccgccgtctgtggaagatcttcaaatattaacaaaaattctgcatgccatgaaggaggacagtgagaaagttccaagcttgttaacggactatatactgaaagttctgtgtccgacataga

SEQ ID NO: 1088 - DNA, 1912 bp, Rattus norvegicus
cgctgagtgggttttcggatcatgtctggtggctccgcggattacaacagagaacatggcggcccagagggaatggaccccgatggtgtcatcgagagcaactggaatgaaattgttgataactttgatgatatgaatttaaaggagtcccttcttcgaggcatctatgcttatggttttgagaagccttcagctattcagcagagagctataatcccatgtattaaaggatatgatgtgattgctcaagctcagtcaggtactggcaagacagccacatttgctatttccatcctgcaacagttggagattgagttcaaggagacccaagcactagtattggcccccaccagagaactggctcaacagatccaaaaggtcattttggctcttggagattatatgggagcaacttgtcatgcttgcattggaggaacaaatgttcgaaatgaaatgcagaagttgcaggctgaagcccctcatattgttgttggcactcctgggagagtatttgatatgctaaacagaagatacctttctccaaaatggatcaaaatgtttgttttggatgaagcagatgaaatgttgagccgagggtttaaggatcagatctatgagattttccaaaaattaaatacaagcattcaggttgtgttactttctgccacaatgccaactgatgtcctagaagtgaccaagaaattcatgagagatccaattcgaattctggtgaagaaggaagaattgacccttgaaggaattaaacaattttatattaatgttgagcgagaggagtggaagctggacactctttgtgacttgtatgagactttgactatcacacaagcagttatttttctcaatacaaggcgcaaggtggactggctcacggagaaaatgcatgccagggacttcacagtttctgctctgcatggtgacatggaccagaaggaaagagatgtcatcatgagggaattccgatcagggtcaagccgtgttctgatcactactgacttgttggctcgtgggattgatgtgcaacaagtgtccttggttataaactatgatctacctaccaatcgtgaaaactatattcacagaattggcagagggggtcgatttgggaggaaaggtgtggctataaactttgttactgaagaagacaagaggattcttcgtgacattgagactttctacaatactacagtggaggaaatgcccatgaatgtggctgacctaatttaattcctgggatgagatagtttggaatgcagtgctcgctgttgctgaataggcgatcacaacgtgcattgtgcttctttgagaatatttgaatcttgtctcaatgctcataacggatcacaaatacagattctgatagcaaagcgactttagtcctgagctcttgtgaggaaaggcattggctttatcctctttagagttagactgttgggggtgggtataaaagatggggtctgtaaaatctttttttcttagaaattcatttactagttatgtagaaatggttgtattagatgttctctatcatttaataatatacttgtggactaaaagatataagtgctgtataaaatcagccaattatgttaaactagcatatctgcctttattgtgtttgtcattagcctgactagaaaggcctttaaagtgatctttttttagagaaaatttgaatgcattttgtttattgtatttattcaataaagtatttaattagtgctaagtgtgaactggaccctgttgctaagcctcagcaagcaatcatcctaggtagggttaacaaccccccagtaaaattgccatattgcacatgtcttaatgaagtttgaatgttaaataaaaattgtatattcactttaaaaaaaaaaaaaaaaaaaaaaaaaaaaaaaaa

SEQ ID NO: 1089 - DNA, 3231 bp, Rattus norvegicus
cgggtggaccccagggcactgccacgacctcagggtgacacgcggagcccgggagcgcaaggatggaggcacgattggtctggggagtgctcgtcggacctctcagggttctctgcgtcctgtgctgcctgctgggccaggtggaccccagggcactgccacgacctcagggtgacacgcggagcccgggagcgcaaggatggaggcacgattggtctggggagtgctcgtcggacctctcagggttctctgcgtcctgtgctgcctgctgggcgggtggaccccagggcactgccacgacctcagggtgacacagcgagcccgggagcgcaaggatgggaggcacgattggtctggggagtgctcgtcggacctctcagggttctctgcgtcctgtgctgcctgcttgggcgggtggaccccagggcactgccacgacctcagggtgacacgcggagcccgggagcgcaaggatggaggcacgattggtctggggagtgctcgtcggacctctcagggttctctgcgtcctgtgctgcctgctgggccacgccatcgctgcaccatcgcccatcatcaagttccccggcgatgtcgcccctaaaacagacaaagagttggcagtgcaatacctgaatactttctatggctgccccaaggagagttgcaacctctttgtgctgaaagataccctcaagaagatgcagaagttctttgggctgccccagacaggtgaccttgaccagaacaccatcgagaccatgcggaagccaagatgtggcaacccagatgtggccaactacaacttcttcccccgcaagcccaagtgggacaagaaccagatcacatacaggatcattggttacacacctgacctggaccctgaaaccgtggatgatgcttttgctcgggccttaaaagtatggagcgacgtcactccgctgcgcttttctcgaatccatgatggggaggctgacatcatgatcaactttggacgctgggagcatggagatggatacccgtttgatggcaaggatggactcctggcacatgcctttgccccgggcactggtgttgggggagattctcactttgatgatgatgagctgtggaccctgggagaaggacaagtggtccgcgtaaagtatgggaacgctgatggcgagtactgcaagttccccttcctgttcaacggtcgggaatacagcagctgtacagacactggtcgcagtgatggcttcctctggtgctccactacatacaactttgagaaggatggcaagtatggcttctgcccccatgaagccttgtttaccatgggtggcaatgctgatggacagccctgcaagtttccgttccgcttccagggcacctcctacaacagctgtaccaccgagggccgcaccgacggctaccgctggtgtggcaccaccgaggactatgaccgggataagaaatatggattctgccccgagaccgctatgtccactgtgggtggaaattcagaaggtgccccatgtgtcttccccttcactttcctgggcaacaagtatgagagctgcaccagcgccggccgcaacgatggcaaggtgtggtgtgcaaccacaaccaactacgatgatgaccggaagtggggcttctgtcctgaccaaggatatagcctattcctcgtggcagcccatgagttcggccatgccatggggctggaacactctcaggaccctggagctctgatggcccctatctacacctacaccaagaacttccgattatcccatgatgacatcaaggggatccaggagctctatgggccctcccctgatgctgatactgacactggtactggccccacaccgacattgggacctgtcactccggagatctgcaaacaggacattgtctttgatggcatcgctcagatccgtggtgagatcttcttcttcaaggaccggtttatttggcggacagtgacaccacgtgacaagcccacaggtcccttgctggtggccacattctggcctgagctcccagaaaagattgacgctgtgtatgaggccccacaggaggagaaggctgtgttcttcgcagggaatgagtactgggtctattctgccagcactctggagcgaggataccccaagccactgaccagcctggggttgccccctgatgtccagcaagtagatgctgcctttaactggagtaagaacaagaagacatacatctttgcaggagacaagttctggagatacaatgaagtgaagaagaaaatggacccgggtttccctaagctcatcgcagactcctggaatgccatccctgataacctggatgctgtcgtggacctgcagggcggtggtcatagctacttcttcaagggtgcttattacctgaagctggagaaccaaagtctcaagagcgtgaagtttggaagcatcaaatcagactggctgggctgctgagctggccctgttcccacgggccctatcatcttcatcgctgcacaccaggtgaaggatgtgaagcagcctggcggctctgtcctcctctgtagttaaccagccttctccttcacctggtgacttcagatttaagagggtggcttctttttgtgcccaaagaaaggtgctgactgtaccctcctgggtgctgcttctccttcctgcccaccctaggggatgcttggatatgtgcaatgcagccctactctgggctgccctggtgctccactcttctggttcttcaacatctatgaccttttattggcttcagcactctcagagttaatagagactggcttaggagggcactggtggccctgttaacagcctggcatggggcagtggggtacaggtgtgccaaggtggaaatcagagacacctggtttcaccctttctgatgcccagatacctgcaccaccttaactgttgctttgtatgccccttcgctcgtttccttcaaccttttcagttttccactccactgcatttcctgcccaaaggactcgggttgtctgacatcgctgcatgatgcatctcagcccgcctagtgatggttcccctcctcactctgtgcagtcatgcccagtcacttcctccactggatggaggagaaccaagtcagtggcgtggaaaactgaaaaggttgaaggaaacgagcgaagggcatacaaaagcaacagttaaggtggtgcaggtatctgggcagcagaaagggtgaaaccaggtggca

SEQ ID NO: 1090 - DNA, 1613 bp, Rattus norvegicus
gaattccgctgactgcttcctgtatctgaaaatatctttccacctgggaaacctaaactgaagtttccaaaaaggatagattaaaccctgtcctcagaaaaccctgactttagtggatcaaaagttagattatctggaagatgatgtaaagggttgacttgttgcacaaagggatcagagaacaaaattcagaaacctccttcttaacctgctggcacctgtccaccacttcccaagtcaccattgaactagtgccacctcaagtggttgaaggagaagatgtcctattccttgttcacaaactgccagaaaaccttattggcttctgctggtacaaagggtcaccaattataaaacatggcattgcactgtatgaagcaaacactaaagtaggtgtggcagggcccatgtacagtgctagagagacattgtacagaaacgggtccatgttgatccacaatgtcacccaaaaggacacaggattctacagactacgaatctttaatagacatcgagatactatgttaacatccacattcctccacgtgaatctcttcctttggaactgcgggcaccttgttgcctctggccgacccagtattgaaacactgccaccgattgttcaagatgggaaggatgttgttctacaggttcgcaatctcccagagaatcttctaggctttgcatggttcaaagggatgacccaggccacaacacatctaattggtcgatacataatagaagaaaatccaagtttttcatttggacctgcaagcagtggtagagagaaattgtatactgatggatccctgctgattgaaaatgtcactcagaaggatgctggattgtacaccctaggaattctgggtacagatatgaagagtcaagaagcacatggagaaatccaggtggagagtcttgtgtttcagtgctgtaactctctgactcctgccaaaatcctggttgaacctgtgcctcggcatgctgctgaaggggaaagtgttcttctccttgttcattatctgccaaaagagctgatatcctttacctggtacaactcaatgtatacggtcccaacatttaaaattgtaaaccaccatgtaattggaaatatcaccacctggggggatgcatacagaggaagaggaatgctgtatgtcagtggatccctactgctccaggacatcactaaggaggatgcaagaatgtatacactagaaactttaaatataaataacaaggttgaaaaagcacatgtgcagttttatgtaaatgagcctgtgacacaacccttcattcgagtcgccaatatcacagtcaaagggagcagatctgtgaccttctcctgtgtttcacctcacactggaatctccatccattggttcttcaataatcacaatctgaagttcacagataggacaaagttgtctccatcaaagtgtggactcagaatagatgacgttagaagagaggatgctggagagtacaagtgtgaggtcatcaacagagctggtaaaggagtggtcagccagccagtcaggtggccatgatgaatgagagccccttcctcacttcctacaatagggtggaataaaacaaggaagcggaattcc

SEQ ID NO: 1091 - DNA, 483 bp, Rattus norvegicus
gaattcgtcgaccgggagctgaagctgttcacagagggagcacaaaggaggtggcaggtggcagttgtcatgatgaactctgttgcactttcctgtaacagctgtacctcctggcaggggctcttgctcacagtctcccttttaacctcctggctgcttcccaccactgcccaagtcaccattgaagcagtgccacccattgctgttgaaggggaaactgttcttctgtttgtgcataacctgccagagaatgttcaagtcctttcctggtacacaggacttgcagcactcaagagttgtgaaattgaaagatatgtgatagctaccaagtctcatgaggtgggaccggcatacagtagtagagagacaatactacgcaatggatctctgatgatcaaaagtgtcaacaaaaaagactcaggatactacacgctaaaaatacttagtacaacctcaagttctgaaataatacatgcagaattc

SEQ ID NO: 1092 - DNA, 1521 bp, Rattus norvegicus
atgcccgggctggggcggagggcgcagtggctgtgctggtggtgggggttactgtgcagctgcggccccccgccactgcggccccctctgccggtagccgcggccgccgccggggggcagctgctgggagccggcgggagccctgtgcgcgccgagcagccaccgccgcaatcctcctcttcgggcttcctctatcggcggctcaagacccacgagaagcgggagatgcaaaaggagatcctgtcggtgttggggctgcctcacaggccgcggcccctgcacggtctccagcagcctcaatcccccgtgctcccgcagcagcaacaatcgcaacagacggcccgcgaggagccccctccagggcggctgaagtccgctccgctcttcatgctggatctctacaactccctgtccaaggacgacgaagaggatggggtgtcagagggagagggactggagcccgagtcccacggaagggccagctcgtcccagctcaaacagccatctcccggggctgcacactccctgaaccgcaagagtctcctggccccgggacccggcggcagtgcgtccccactgaccagcgcgcaggacagcgctttcctcaacgacgcggacatggtcatgagctttgtgaacctggtggagtacgacaaggagttctccccacgccagcgacaccacaaggagttcaagttcaacttatcccagattcccgagggtgaggcagtgacggctgcagagttccgcgtctacaaggactgtgtggtggggagttttaaaaaccaaacttttcttatcagcatttaccaagtcttacaggagcatcagcacagagactctgacctatttttgttggacacccgggtggtgtgggcctccgaagaaggctggctggaattcgacatcacagcaactagcaatctgtgggtggtgacaccgcagcacaacatgggactccagctgagtgtggtgactcgggacggactccacatcaacccccgtgcggcgggcctggtgggcagagacggcccttacgacaagcagcccttcatggtggccttcttcaaggtgagcgaggtccacgtgcgcaccaccaggtcagcctccagtcggcgtcgacagcagagtcgcaatcggtccacccagtcgcaggacgtgtcccggggctccagtgcttcagactacaacagcagtgagttaaaaacagcttgcaagaagcatgagctttacgtgagcttccaggacctgggatggcaggactggatcatcgcacccaaaggctacgctgccaactattgtgacggagagtgttccttccctctcaatgcacacatgaatgccaccaaccacgccattgtacagaccttggtccaccttatgaatcccgagtacgtccccaaaccatgctgcgcaccaaccaaactgaatgccatctcggttctttacttcgacgacaactccaatgtcatcttgaaaaaatacaggaacatggttgtgagagcttgtggatgtcattga

SEQ ID NO: 1093 - DNA, 1162 bp, Rattus norvegicus
cgggaaggagtttctgtgagactgtgttcatcaggatggtacaagctaagacctggaccctaaagaagcactttgaaggcttccctacggacagtaactttgagttgaggacgactgagctcccacccttaaataatggagaggtcctgctggaagccctgttcctctccgtggacccttacatgagagttgcagcaaaaaaactgaaggagggcgacagcatgatgggtgaacaagtggccagagttgtggaaagtaaaaactcagccttcccaacgggaacgattgttgtggctttattaggttggacatcacattccatttctgatgggaatggactgagaaagctacctgcagagtggcctgacaagctaccactgtctttggctttggggacagttggcatgccaggcctcactgcctactttggcctgcttgacatctgtggcttgaagggtggagaaacagtgctggtcaatgcggcagccggggctgtgggctctgttgtggggcagatagctaagctcaagggctgcaaagttgttggtacagccgggtctgatgaaaaggttgcctatcttaagaagcttggattcgatgtggcctttaactacaagacagtaaagtcattggaagaagctttgaggacagcctctccagatggttatgattgctactttgataatgtcggtggagagttttcaaacactgttatactgcagatgaagacgtttggaagaattgccatctgtggcgccatctctcaatacaaccgcactggcccatgtcccccaggcccatctccagaggtcattatctatcagcaactccgcatggaggggttcatcgttactcggtggcaaggagaagtccgccagaaggctctgacagacttgatgaattgggtttcagagggtaagatccggtatcatgaatacatcactgaaggatttgagaagatgcccgcagcgttcatgggaatgttgaaaggagacaatctggggaagactatagtgaaagcgtgaaaaaaaatggctcacgaatggcttaaccatttaatacaaatgcatatgtaaaacgtaactgcaaggagtttggcctatctaataaaacatggtgggttttttccatctgtgaaaaaaaaaaaaaaaaaaaaaaaaaa

SEQ ID NO: 1094 - DNA, 3010 bp, Rattus norvegicus
gagcgagcgggcgcaccaaggcgaggccagggccgaggcgcggggacggcggccgagagctaagcgaagcgctgggacggtgactgggaacggatcggagcgcgggacccggcgccgggtctcgtgcgtccccgccgatgggcgcgccgccgagccggtgctaactgggtcttccctgaagcagaaggaacagtatttcctacctttccgaaccgaagaccaagaagctagagaatctatgtaaataaactgaaatctctgttggctttgcacccccagcccggagccgtcacttttcctggtctgaggagcgtgtagacctcggccagccgctatgaatgtgaccagcttgttttcattcacaagcccagctgtgaagagactccttgggtggaaacagggcgacgaagaagagaaatgggcggagaaggctgtggacgctttggtgaagaaactgaagaagaagaaaggggccatggaagagctggagaaggccctgagctgccccgggcagcccagtaactgtgtcaccattcctcgctccctggatggcaggttgcaggtgtcccaccggaagggactgcctcatgtcatttattgccgcgtgtggcgctggcccgacctccagagccatcatgaactaaagcctctggaatgctgcgagttcccatttggttccaagcagaaggaagtctgcatcaatccctaccactataagcgagtggagagccccgttctcccaccggtgctggttccgaggcacagcgagtacaaccctcagcacagccttctggctcagttccgaaacctgggacaaaatgagccccacatgccactgaatgccacgttccccgactccttccagcagccacacagccacccgtttccccagtcccccaacagcagctaccccaactctcctggcagcagcagcagcacctaccctcactccccgaccagctcagacccgggcagcccttttcagatgccagccgacacacccccgcctgcttacctgcctcctgaagaccccatggcccaggatggctctcagcctatggacacgaacatgacgaacatgacggcaccgacactgcccgcggagatcaatagaggagatgttcaagcagttgcttacgaggaaccaaaacactggtgctctattgtgtactatgagctcaacaaccgtgtgggcgaagcgttccatgcctcctccaccagcgtgttggtggatggtttcaccgatccttccaacaataagaaccgattctgccttgggctgctctccaatgttaaccggaactccactattgaaaataccaggcgacacatcgggaaaggagtccacctttattacgtcggaggagaggtgtatgcggagtgcctcagtgacagcagcatcttcgtgcagagtcggaactgcaactaccaccatggctttcatcccaccacggtctgcaagatccccagcgggtgcagcttgaaaatcttcaacaaccaagagttcgctcagctactggcgcagtctgtgaaccatgggttcgagacagtgtatgaactcaccaaaatgtgcactattcgaatgagcttcgtgaagggctggggagcggagtaccaccggcaggatgtcactagcaccccctgctggattgagatacacccgcatggccctctccagtggctggataaagtccttacccagatgggttcgccccacaaccctatttcgtcggtgtcttaaagggccctcggcttctgtctcttgcaaactattgggccttgcatgtacttgaaggacggagaagtcagacaggatggggagctgtaaaggagccgtgatacttgacctctgtgaccaaccgttggatggagaagctgacaggccttggtaacaagctgttgatatcaagaacccgcttagtttacattgtgacattctgttgtaaaatcaactaaaatgctgacttttagcaggactttgtgaatagttagaaaagagatggccaagccaggggcaaattatctattaggaaaaaagcaaaaaaaaaggccctaagcaatccttttgtgtggggtgttggcagaaggttggcgccgatcatctttatggagtgggctctcatcaggctcggagcccacgctgatcatcctctcatgggttttcttaatattttaaaactatttgtttagaaatgaatgggtttttttgtttgttttaaagtaaaggttaattgttatgccatgcgtagtaacctttctgaagctgtatgctgactgtattgctgtcaggatgacgtcaggcatatgccctttgctaaatatgtatatacagaatacttggaggttatgaatagtccaaatggctagtgggtctacacagtatctgaggggcggggtcggggaggaaaaacgacagctgcaaatgtagacattgccgtaaagcccagcctgttgccttaaacggacaagctggtgtcggactttgctgtgtttcaggttttttagagttttacctggcttttcttcctttcttttctgctgtctcatccgctccacaatgcagttaagcagctggttaattcctctaactgtaagggcaaatgagtaattccttctgttcgcaaacggactggctctgcgtcccagttcccggaacatgaaaagcgtggatttaacgagcagttcttatggcgtttacaatacagacataggctttgatttttcaaataaattgtttgccaaacctggtaactctgttcattattcgcaggtttgaagaagatctctatcagaatccatttcaaagttttttttttttaattttgtttcatttttttttgtactatttggttttcttctgttgaagttttctattctccttttctcttatacagcgagttcttttattccaacactagcagggtttttctctactggaaatttttaaataaaacctgtcattattgcttaaaaaaaaaaaaaaaaaaaaaaaaaaaaaaaaaaaaaaaaa

SEQ ID NO: 1095 - DNA, 1940 bp, Rattus norvegicus
ggaattcggcacgaggtgatttccagcttttggaagccccggtgctttacgaaatcacggtagccggagagccatggagatggaacagttgaccttccgagatgtggctgttgacttctctccggatgagtgggaatgcctggaccctcctcagcagaggctgtacagggacgtgatggtagagaactacagaaacctggtctctgtggctctttctcatcattgtacccagaacttttcaccagaacagatcctaaaatattccttcacaaaaggaactaatggaagttgtggccttaaaagtttatacttaagggaagattgtatatatatagatgagagtaaagcccaccatggtagagatatgcaatgtctaattacaagcaataccaaagatgtcattgacagcagagatcaagaacacaaaaccgctctgacaataactcctgtgaggccagatactttggatgagccaagtatctataactgtaaatatccacaggaaagttttcagcatgacttaactttgaaagaaagtttggaagatctgatagatgggttaatgtttcacccaaacagttccatagataaagaattaagaagcagaggactgatatcaacaagtgatcaaattgagactttctatactgaaagatccttactcttcagtcagcaaatagctatctcctatgacccaaagcacaattctattgattatggattgcctgctattgatccattatcacatagcccaaatggcgatacagatgtgtgggaaagccctttcatgtataaggaaactagcaaagattttagtagtgaatctttactaaataactgcaatgatattatcttagagaaatctagtcagtataacaaaatatgtaacgactttgaccattgctcaagtcccaacaaatatcagtatactcttccaaagaagcctttcaattgtgataatttctttactcaatgttcaaagctttctatccatcaatatgttcaagataattgttacaagagtatcgattgtgacacaatgtttaataaaactttaaatgttattacacataaaattcagcattcccagaaatcctacaaatgtaatgaatgtggcaaagcttttaaatattgctcaagttacagaaaacacagaataattcacacaggagaaaaacccttcaaatgtaaagtatgtggaaaatcctttacccaatgtgcaagccttaaaaaacatcagagaatccacacaggagagaaaccctacaaatgtgaagaatgtggcagaagctttaaccactactcaattcttggtcagcaccagaggattcatacaggagagaaaccctacaagtgtaaacagtgtgggaaatcctttactcaatgttcaagccttcagaaacaccaagtaatccacactggagagaagcccttcagatgtgcagaatgtggcaaatcctttacgcaaaactcaacccttagtcaacaccagagaattcatactggagaaaaaccttacaaatgtgaacagtgtggaaaggcctttacccaatgttcaagccttagaaaacaccagagaattcacactggagagaaaccctacaaatgtgaagaatgtggcagagcctttaactgccgttcatcttttactaaacacacaagagaattcacacaggagagaaaccttacaaatgtaaagactgtgacaaagctttcatccactgcacaaaccttactcaacaccggagaatccatacaggagagaaaccatacaaatgtaatgaatgtggaaagtcctttagtcagtgttccaaccttagaaaacatgagagaattcatacatgagtaaaactaacaaatgtaaagaatttagtaaatcttttatccatatgcaaaaaaaaaaaaaaaaaaaaaaaaaaaaaaaaaaaaaaaaaaaaaaa

SEQ ID NO: 1096 - DNA, 3650 bp, Rattus norvegicus
tggggcaattgggctgacctttcttatgctgggatgtgccttggaggactatgggtgtctatctctgaagtaagatgacgtgtcagaaattctatgtggttttgttacactgggaatttctgtatgtgataactgcacttaacctggcctatccaacctctccctggagatttaagctgttttgtgcgccaccgagtacaactgatgactcctttctctctcctgctggagtcccaaacaatacttcgtctttgaagggggcttctgaagcacttgttgaagctaaatttaattcaactggtatctacgtttctgagttatccaaaaccattttccactgttgctttgggaatgagcaaggtcaaaactgctccgcactcacaggcaacactgaagggaagacgctggcttcagtggtgaagcctttagttttccgccaactaggtgtaaactgggacatagagtgctggatgaaaggggacttgacattattcatctgtcatatggaaccattacttaagaaccccttcaagaattatgactctaaggttcaccttttatatgatctgcctgaagttatagatgatttgcctctgcccccactgaaagacagctttcagactgtccagtgcaactgcagtgttcgggaatgcgaatgtcatgtaccagtacccagagccaaagtcaactacgctcttctgatgtatttagaaatcacatctgctggtgtgagttttcagtcacctctaatgtcactgcagcccatgcttgttgtgaagcccgatccaccgctgggtttgcgtatggaagtcacagatgatggtaatttaaagatttcatgggacagccaaacaaaagcaccatttccacttcaatatcaggtgaaatatttagagaattctacaatcgtaagagaggctgctgaaatcgtctcggatacatctctgctggtagacagcgtgcttcctgggtcttcatacgaggtccaggtgaggagcaagagactggatggctcaggagtctggagtgactggagtttacctcaactctttaccacacaagatgtcatgtattttccacccaaaattctgacgagtgttggatccaatgcttccttttgctgcatctacaaaaatgagaaccagactatctcctcaaaacaaatagtttggtggatgaatctagccgagaagatccccgagacacagtacaacactgtgagtgaccacattagcaaagtcactttctccaacctgaaagccaccagacctcgagggaagtttacctatgatgcagtgtactgctgcaatgagcaggcatgccatcaccgctacgctgaattatatgtgatcgatgtcaatatcaatatatcatgtgaaactgacgggtacttaactaaaatgacttgcagatggtcacccagcacaatccaatcactagtgggaagcactgtgcagttgaggtatcacaggcgcagcctgtactgtcccgataatccatctattcgtcctacatcagagctcaaaaactgcgtcttacagacagatggcttttatgaatgtgttttccagccaatctttctattatctggctatacaatgtggatcaggatcaaccattctttaggttcacttgactctccaccaacgtgtgtccttcctgactccgtagtaaaaccactacctccatctaatgtaaaagcagagattactataaacactggattattgaaagtatcttgggaaaagccagtctttccagagaataaccttcagttccagattcgatatggcttaaatggaaaagaaatacaatggaagacacacgaggtattcgatgcaaaatcaaaatcggccagcctgccagtgtcagatctctgtgcggtctatgtggtacaggttcgctgccggcggttggatggactagggtattggagtaattggagcagtccagcctacactcttgtcatggatgtaaaagttcctatgagagggcctgaattctggagaataatggatggggatattactaaaaaggagagaaatgtcaccttgctttggaagccactgatgaaaaatgactcactgtgtagtgtgaggaggtatgtggtgaagcatcgtactgcccacaatgggacatggtcacaagatgtgggaaatcagaccaatctcactttcctgtgggcagaatcagcacacactgttacagttctggccatcaattccatcggtgcctcccttgtgaattttaaccttacgttctcatggcccatgagtaaagtgaatgctgtgcagtcactcagtgcttatcccctgagcagcagctgcgtcatcctttcctggacactgtcacctaatgattatagtctgttatatctggttattgaatggaagaaccttaatgatgatgatggaatgaagtggcttagaatcccttcgaatgttaacaagtattatatccatgataattttattcctatcgagaaatatcagtttagtctttacccagtatttatggaaggagttggaaaaccaaagataattaatggtttcaccaaagatgatatcgccaaacagcaaaatgatgcagggctgtatgtcattgtaccgataattatttcctcttgtgtcctgctgctcggaacactgttaatttcacaccagagaatgaaaaagttgttttgggacgatgttccaaaccccaagaattgttcctgggcacaaggacttaatttccaaaagcctgaaacatttgagcatctttttaccaagcatgcagaatcagtgatatttggtcctcttcttctggagcctgaaccagtttcagaagaaatcagtgtcgatacagcttggaaaaataaagatgagatggtaccagcagctatggtctcacttcttttgaccactccagattccacaaggggttctatttgtatcagtgaccagtgtaacagtgctaacttctctggggctcagagcacccagggaacctgtgaggatgagtgtcagagtcaaccctcagttaaatatgcaacgctggtcagcaacgtgaaaacagtggaaactgatgaagagcaaggggctatacatagttctgtcagccagtgcatcgccaggaaacattccccactgagacagtctttttctagcaactcctgggagatagaggcccaggcatttttccttttatcagatcatccacccaatgtgatttcaccacaactttcattctcagggttggatgagcttttggaactggagggaaattttcctgaagaaaatcacggggaaaaatctgtgtattatctaggagtctcctcaggaaacaaaagagagaatgatatgcttttgactgatgaggcaggggtattgtgcccattcccagctcactgtctgttcagtgacatcagaatcctccaggagagttgttcacactttgtagaaaataatttgaatttagggacctctggtaagaactttgtaccttacatgccccagtttcaatcctgttccactcacagtcataagataatagaaaataagatgtgtgacttaactgtgtaatcttgtccaaaaacttccaggttccattccagtagagtgtgtcatgtataatatgttcttttatagttgtgggtgggagagaaagcc

SEQ ID NO: 1097 - DNA, 1313 bp, Rattus norvegicus
ccctcaggccaactccttgtgagacttcacagaaggcaaaggcgttccaggacacactgcagctgcggccaactgcccagggggtggagactgctctcgggctctcagttgcccttcaggttctgcaccctggggacctggcagtggcagaatcatgtgggcatctgaatccactttgacatatggccctctggctcttcaaagcagtgtttgttcatggtccatgctggcgaggtccttaagaacacagaagtccatgtcagcagataaccagcctaccggagccaaaagggtgtggaggaaacctactgctaacagtgaaccactgtcaactgagtattccgagaggcagcatcccctgctgactgagaaattgatccaagcattaacacctgctggaagaagcagagaaggttgtgcatggtctgggaatcccagagttcatctacaaacaaagaggaggcgttctggatggatggcagctggaagccttcgccatagcccgctcttcttcaacacttaagcatttacctgggcattaagtaatgaaaattttgaaaccatatatgaggaatacatccatcttgtactacctgtgtttccttctcaacagtcacttcttaactgaggctggcatccatgtcttcattttgggctgtgtcagtgtaggtctccctaaaacagaggccaactggatagatgtaagatacgatctggagaaaattgaaagtcttattcaatttattcatattgatactactctatacactgacagtgactttcatcccagttgcaaagttactgcaatgaactgctttctcctggaattacaggttattttgcacgagtacagtaacatgactcttaatgaaacagtaagaaacgtgctctaccttgcaaacagcactctgtcttctaacaagaatgtaatagagtctggctgcaaggaatgtgaggagctggaggagagaaacttcacggagtttttgcagagttttatacatattgtccaaatgttcatcaacacgtcctgactgcactcgaaccttgtcagtgtttctgttattaagacacctccgcctgcccagaggcagcacagctccatgcattcgtgatctgctgggaaaccaagctgcctaacaggaaacggttgagccatttggatcccatgaaccctcgggaatgaagagagggaaagggcttttctcggacttatttttgcttgcttatttttaatttattacttcagttgtgcatatttgtaatataatagaagatgtggaataaagttgtatgcatattttatcagttga

SEQ ID NO: 1098 - DNA, 768 bp, Rattus norvegicus
gagaggcgcgtcgggggctccgccgctggctaggcgtgatgttgcacgtggagatgttgacgctgctctttctggtgctctggatgtgtgtgttcagccaggacccgggctccaaagtcgtcgccgaccgctacgccgtctactggaacagcagcaaccccagattccagaggggtgactaccacatcgatgtctgtatcaatgactacctggatgttttctgccctcactatgaggactctgtaccagaggataagactgagcgctatgtcctgtacatggtgaattttgatggctacagtgcctgcgaccacacatccaaagggttcaagagatgggaatgtaaccggcctcactctccaaacggaccgctgaagttctcggagaaattccagctcttcactcccttttctttaggatttgaattcaggccaggccgagagtatttctacatctcctctgcaatcccagacaatggaagaagatcctgcctaaagctcaaagtctttgtgaggccaacaaacagctgtatgaaaactataggtgttcgtgatcgtgttttcgatgttaacgacaaagtagaaaattcattagaaccagcagatgacaccgtacatgagtcagccgagccatcccgcggagagaacgcggcacaaacaccaaggatacccagccgccttttggcaatcctactgttcctcctggcgatgcttttgacattatagcacagtctcctcccgtcacctgtcacagaaaacatcagggtct

SEQ ID NO: 1099 - DNA, 3609 bp, Rattus norvegicus
ggcgcctgctgtgacggcgacggccggacgacgcgcgcggggggctgcggccgcgacgagtgcgacacgtacgtgcgcgtgtgccttaaggagtaccaggccaaggtgacgcccacggggccctgcagctacggctacggcgccacgcccgtgctgggtagcaactccttctacctgccgccggcgggcgctgcgggagaccgagcgcgcgcgcggtctcggaccggcggccaccaggacccgggcctcgtcgtcattccctttcagttcgcctggccgcgttctttcaccctcatcgtggaggcctgggattgggacaatgacaccacaccagatgaggagctgctgattgagcgggtgtcccatgctggcatgatcaaccctgaggaccgctggaagagcctgcacttcagcggccacgtggcacacctggagctgcagatccgagtgcgctgtgacgagaactactacagtgccacctgcaacaagttctgccggccccggaacgacttcttcggccactacacctgtgaccagtacggcaacaaggcctgcatggatggctggatgggcaaggagtgcaaagaagccgtgtgtaaacaaggatgtaatttgctccacgggggatgcactgtgcctggggagtgcaggtgcagctatggctggcagggcaagttctgtgatgaatgtgtcccctaccctggctgcgtgcatggcagctgtgtggagccctggcactgtgactgtgagaccaactggggtggcctgctctgtgacaaagacctgaactactgtggcagccaccacccctgtgtcaatggaggcacctgtatcaacgccgagcctgaccaatacctctgcgcctgcccagatggctacttgggcaagaactgcgaacgggctgagcacgcctgcgcctccaacccgtgtgccaacgggggctcttgccacgaagtgctgtctggctttgaatgccactgtccgtcgggatggagtggacccacctgtgcgcttgacatcgatgagtgtgcctctaatccgtgtgcggcgggtggcacctgcgtggatcaggtggacggcttcgagtgcatctgcccggagcagtgggtgggggctacctgccagctggacgccaatgagtgtgaagggaaaccgtgccttaatgctttttcttgcaaaaacctgattggcggctattactgtgattgcctcccgggctggaagggcgccaactgccacatcaatatcaacgattgccatgggcagtgtcagcatgggggcacctgcaaggacctggtaaatgggtaccagtgcgtatgcccacggggcttcggaggtcgtcactgcgaactagagtactacaagtgtgccagcagcccctgccgtcggggtggcatctgtgaggacctggtggatggcttccgctgccactgcccacggggcctctctggtccgctctgtgaggtggacgtggatctctggtgcgaaccaaacccctgcctcaacggtgctcgctgctacaaccttgaggatgactactactgcgcctgcccagaagactttggcggcaagaactgctctgtgcccagggagacatgccctggtggggcctgtagagtgatcgatggctgtgggttcgaggcaggatccagggcgcatggtgctgcgccctccggcgtgtgcggtcctcacgggcactgtgtcagcctgcctgggggaaacttctcctgcatctgtgacagcggcttcacgggcacctactgccatgagaacatcgacgactgcatgggtcagccctgccgcaacgggggcacgtgcattgatgaagtggactccttcgcgtgcttctgccccagtggctgggaaggagagctctgtgacatcaatcccaacgactgcctccccgacccctgccacagccgcggccgctgctatgacctggtcaatgacttctactgtgtctgcgatgatggctggaaggacaagacctgccactcacgcgagttccagtgtgacgcctacacctgcagcaacggtggcacatgctatgacagcggcgacaccttccgctgcgcgtgccccccaggctggaagggcagcacctgcacgatcgccaagaacagcagctgcgtgcccaatccctgtgtgaatggaggcacctgtgtgggcagtggagactctttctcctgcatctgccgggatggctgggagggccgcacctgcacacacaacaccaatgactgcaaccctctgccctgctacaacggaggcatctgtgtggatggcgtcaactggttccgctgcgagtgtgcacctggctttgcgggtcctgactgccgtatcaacatcgatgagtgccagtcctcaccctgtgcctacggagccacgtgtgtagatgagatcaatgggtaccgctgcagctgcccaccaggacgttccggccccagatgccaggaagtggtcatattcacgaggccctgctggtcccggggcgtgtccttcccacatgggagttcctgggtagaagactgcaacagctgccgctgcctggatggccaccgggactgcagcaaggtgtggtgtggttggaagccttgtctgctgtcccctcagcccagtgctctgagtgcccagtgcccaccagggcagcagtgccgggagaaggccatgggtcagtgtctgcagcccccctgtgagaactggggggagtgtacagcagaggatcctctgccccccagcaccccctgtctgccacggaccactcatttggacaacaactgtgctcgcctcacactgcactttaaccgtgaccaagtgcctcagggcaccaccgtgggcgccatctgctctggaatccgagccctgcccgccacgagggcggcggcacgagaccgcctcctcctgctgctctgtgaccgcgcatcctcaggggccagtgccgtggaggtggctgtgtctttcagccctgcaagggacctgcccgacagcagcctgatccagagcacagcccatgccatcgtggctgccatcacccagagaggaaacagctcactgctgctggctgtcaccgaggtcaaggtggaaacagttgttatgggtggctcttccacaggtctgttggtacctgtgctgtgtagcgtgttcagtgtgctgtggcttgcctgtatggttatctgcgtgtggtggacacggaagcgcaggaaagaacgtgagaggagccggctaccacgggacgagagcgccaacaaccagtgggctccgctcaatcccatccgcaaccccattgagcggccaggcagcagtggtctgggaaccgggggccacaaggacgtactctaccagtgcaagaacttcacaccgccgccccgcagggcaggcgaggcactgcctgggccggccagccacggggctggtggggaggacgaggaggatgaggagctgagccgcggagatgggagactctccagaagcagagaagttcctctcacacaaattcaccaaagaccccagctgctccctgggaaggccagcctgctggctccggggcccaaagtggacaaccgcgccgtcagaagcaccaaggatgtgcgctgtgctggcagggagtag

SEQ ID NO: 1100 - DNA, 1050 bp, Rattus norvegicus
atggccgaggctgagtatttcatctggattgctcctgagggtgactttgaggaagaatttggaaatatcacccgaatgctgcccactggagagtatttcagcccctgtaagagggttccaatgaccaacaggcaggctgtagttgtcttctatgcactggtgttccttcttagcttgctgggaaactcgctggtgatgctggtcatcttatacaggcgaaggacccgatccgtcaccgatgtctacgtgctgaacctagccattgctgatctactcttttcattgactctgcccttcttggctgtctccaaatggaagggctggatttttggcacacccctgtgcaagatggtctcactcctgaaggaagtcaacttcttcagtggtatcttgctgctggcctgcatcagtgtggatcgatacctggccatcgtccatgccacccgcacactgacccgaaagcgctacttggttaaattcgtatgcatgggcacctggggtctatccttggttctgtctctgccttttgccatcttccgccaggcatataaaccataccgttctggaacagtctgctatgaggtcctgggtgaagccacagcagatcttaggataacattgcgtggtctgtcccacatatttggcttcctcttgccgctgttcatcatgctggtctgctacgggctcacactgcgcacgctctttaaggcccacatgagacagaaacgccgggccatgtgggtgatctttgctgttgtgttggtcttcctgctctgttgtctgccctacaatctggttctgctctcggacactctcttaggagcccacttgattcaagatacttgcgagcgccgcaataacattgaccaggccttgtatattaccgagatcctgggcttttctcacagttgtcttaaccccgtcatctatgcctttgttggccaaagttttcgccatgaattcctcaagatccttgctaacctggttcacaaggaggttttgacacaccactctgcttcctttcgcacgtctctcaccactatctattaa

SEQ ID NO: 1101 - DNA, 1120 bp, Rattus norvegicus
ccatggatcccggcaccgaggagtacgagctcaacggcgacctgcgccctggctctcccggttcccccgacgcctcgccaccccgctggggtttgaggaaccggcccatcaatgtaaaccattacgccaacaagaagagcgccgcggagagcatgctggacatcgcactgctcatggccaacgcgtcgcagctcaaggccgtggtggagcagggcaatgagttcgccttcttcgtgcccctcgtggtgctcatctccatctctctcgtgctgcagatcggagtgggcgtgctgctcatcttcctggtcaagtatgacctcaacaacccagccaagcacgccaagctggacttccttaacaacctggccacggggctggttttcatcatcgtggtggtcaacatcttcattacggcctttggagtccagaagcctgtcatggacgtggcaccccggcagtaggatgcccagagaccttgaaggtatctgacctgcagcccagctgtccagacccctgcaactgctgtatccccaaggcatccctctcctgttcacagcccaaggtggcctccgctggaccatggtcaaggatggacttccgtccacctgtgactgctgcgtgggcggccacccgaggcgtgtgggaactggatgcaaagccatgaagatcagaactggacagttccaccgaaacccacgcccagaggatgatcactgcccgcccaaggacatgcaggaaatccatgattggactcgatgaggggccagaactgatctctgtctcaggacattccagaaggaccaggatatgcccctccctttgctgatacaccagtgaccctacttctcatggagcatgcacaggtcaccctggagactgctccctttgttgtttcctgacccagggaccttggacagtcatcagtacctgctggctccagcctcagtgcctgggcttggcagtgtctcttggcatcgagaggcagccatgcctgtgggggctgcaggtcatcctggtaccttctaccagtagtgacttgggaagagccccaccccccaacccaggggctcaggccccaattttctaatcaggaatgacaataaagcttatgtcttccccc

SEQ ID NO: 1102 - DNA, 1545 bp, Rattus norvegicus
gtgaactcgtgggagtcccgccctgtgcagagttctgtccagcaagtgaggaagagagcgttggttctcccgaaacagaagagatggctttcttcagcacccagcctccatacatgaacccagtcatcccctttactggaataatccaaggagggttgcagaacggacttcagatcaccctccaggggaccgtccacccttttccaaataggattgcggtgaactttcagactggcttcagtggaaatgacattgccttccacttcaatccccggtttgaggaaggaggatatgtggtttgcaacacaaagcagaatggaaagtgggggcctgaggagaggaagatgcagatgcccttccagaaggggatgccctttgagctttgcttcctggtacagaggtcggaattcaaggtgatggtgaacaagaacttctttgtacagtactcacaccgcgtgccctaccacctcgtggacaccatttcggtctcgggatgcttgcacctgtccttcatcaacttccagactcagggctttcagcctgcccaccaggcacccgtggctcaaactatcatccacacagttcacagcatccctggacagatgctctctactcctggaatccctcctatggcataccccaccccagcctatactatacctttcttcaccagcatcccaaatgggttttacccatccaagtccatcaacatatcaggcgtggtcttgccagatgctaagaggttccatatcaaccttcgctgtgggggtgacattgctttccacctgaacccccgtttcaatgagaaggttgtggtccgaaacactcagatcaacaactcctgggggcccgaggagcgaagcctgcctgggagaatgcccttcaatcgtggccagagtttctcagtgtggatcttatgtgaaggtcactgcttcaaggtggccgtggatggtcagcatatttgtgaatattaccaccgcctgaagaacttgccggatatcaacactctagaggtggccggtgatatccagctgacacacgtgcagacctaggaaggtctctggcttagggatgaaggctgaggaaccctacctgagtcttgtcacctcctccctgtctcagccctgcctccccaaatcctgtcatcaaagagagcctcattggcaggagttccaggaaggtggcattcccaattcacaccctccacaaagggggagtcctgggctatgggacacatggctgtgagcccacagtgtcagccattgctcccaagctagtcatcttctgagggaagtgacctccctgggtttgcccctttctctgacctttcccttcacccctccaggagggccaccttgatgtcatcccattggcctccagctgacccagaatgtccacattaccttttccccaatctttcccaatgcccataaaataaagaatatcaacgcttgtctacaaaaaaaaaaaaaaaaaaaaaaaaaaaaaaaaaaaaaaaaaaaaaaaaaaaaaaaaaaaaaaaaaaaaaaaaaaaaaaaaaaaaaa

SEQ ID NO: 1103 - DNA, 5249 bp, Rattus norvegicus
gaattctcgcacgaggcgccggctcgccgcggcgctgggctaggaagcgacgggcgcttcgcggttcggagacgtccggcgggcctggcaggttcctcggagagtagattttatcaagattcctccctggaacgctggctccttgctcagtgccctgaagtctctctgcgatgaactgatacattggaaccatggtgcaaaagaagttctgccctcggttacttgactatctagtgatcgtaggggccaggcatccaagcagtgacagtgtggctcagactcctgaacttctgcggaggtacccactagaggaccacccggagtttcccctgcccccagatgtggtgttcttctgccagccagagggatgtctgagcgtgcggcaacggcgcatgagcctccgagatgatacctcttttgtcttcaccctaaccgataaggacactggagtcacccgttatggcatctgtgtcaacttctaccgttcctttcaaaagcgaatgccaaaggaaaaggcggaaggcggagcaggaccccgtgggaaggaaggagctcatgccccctgtgcctcagaagaggccgccaccgagagctcagagagtggctcaaccttgcagcctcctagtgctgactccactcctgacgtaaaccagtctcctcggggcaaacgtagggcaaaagcaggcaaccgctcccgaaacagtaccctgacatccctgtgtgtgcttagccactaccctttcttctctaccttcagagagtgtctgtatactctcaaacgtctggtagactgctgtagtgaacggctcctaggcaagaaaccgggcatccctcgaggtgtacaaagggacaccatgtggcgaatctttactggatcactgctagtggaggagaagtccagtgcccttctgcatgaccttcgagagatcgaggcctggatctatcggttgctacgctccccggtgcctgtctctgggcagaagcgagtggacattgaggtcctaccccaggaagtgcagcaggccctgacatttgctcttccagatccatcccggttcaccctagtagatttccctcttcaccttcccttggaacttctgggtgtagatgcttgtcttcaggtgctaacctgcatcctgttggagcacaaggtggtgctacagtctcgagactacaacgcactctccatgtctgtgatggcgtttgtggcaatgatctaccccctggagtacatgttccctgtcatcccgctgcttcccacctgcatggcttcggcagagcagctactcttggctccaaccccatatatcattggagtccctgccagctttttcctctataagctagacttcaaaatgcctgatgacgtgtggctggtggatctggacagcaacagggtgattgcccccaccaatgcagaagtgctacccatcctgccagaaccggaatcattagagctgaaaaaacacttaaagcaggctctagccagcatgagtctcaacacccagcccattcttaatctggagaaattccatgagggccaggagacaccacttctcttgggaaggttttctaatgaccttcagtctacaccttccactgaattcaacccactcatttatggcaatgatgtagattcagtcgatgttgcaacgagagtggccatggttcgtttcttcaactctgctaacgtgctgcagggctttcagatgcacacacgtaccctgcgactcttcccccggcccgtggttgccttccaagctggctcctttctggcctcacgcccccggcagaccccctttgctgagaaactggccaggactcaagccgtggagtactttggagaatggatcctgaacccttctaactatgccttccagcggattcacaacaatacgtttgatccagccctcattggtgacaagcctaagtggtacgctcaccagctgcagcccattcactatcgagtctatgacagcaattctcagctggctgaggccctgagtgtgccaccggagcgtgattctgagtctgaccccactgatgacagtggcagtgacagcatggactatgatgactcaagctcttcttactcctccctgggggacttcgtcagtgaaatgatgaagtgtgacatcaatggcgacactcccaatgtggatcctctgacgcatgcggccctgggagacgccagtgaagtggagattgatgagctgcagccccagaaggagggagaggagcctggcccagacagtgagaactctcaggagaaccttcccctgcgctccagctccagcaccactgccagcagtagccctagcaccatcgtccacggcgcccactctgaacctgctgattctacagaggtgggagataaggcagcaacaggcatctccaagcccctccctcctgtgcctcccagcatttgcaaatctactgtggacaggagacagacagagactggagaggggtcagtgtgccagcgaacctacgaccatccatattttgagccccaatatggctcccccgctgaggaagatgatgacgagcagggagagagctacacgccccggttcagccaacatgccagtggcagtcgggctcaaaagctgctgcggcccaacagcttgaagctggccagtgactcagacgcagagtcagactcccgagcaagctctcccaactccaccgtctctaacaacagcaccgagggcttcgggggcatcatgtcttttgctagcagcctgtatcggaaccatagtacaagcttcagcctttcaaacctcacactgcccaccaaaggtgcccgagagaagactacaccattccccagcctgaaaggaaacaggagggccttagtggaccagaaatcatctgtcattaaacacagcccaactgtgaaaagagaacctccatcaccgcagggccggtccagcaattctagcgagaaccaacagttcctgaaggaggtggtccacagtgtgctggatggccagggagtcggctggctcaacatgaaaaaggtgcgccggctgctggagagtgagcagctccgagtctttgtactgagcaagctgagtcgtgcagtgcagtcagaggatgatgcccgacaggatgtcatccaggatgtggagatcagtcggaaggtgtacaagggaatgctagacctcctcaagtgcacagtcctcagcctcgagcagtcctatgcccatgctggtctgggtggcatggccagcatctttgggcttttggagattgcccagacccattactatagtaaagaaccagacaaacgcaagagaagtccaacagagaatgtaaataccccagttggcaaggatcctggtctggctgggcggggggacccaaaggcaatggctcagctaagggtccctcagctgggtcctcgggcaccaagtgctacaggaaggggtcctaaagaactggacaccagaagtttaaaggaagagaattttgtagcgtctgtgggaccagaggtcatcaagcctgtctttgacctgggtgagactgaggagaaaaagtcccagatcagcgcagacagtggtgtgagcctggcatctgcttcccagaggactgatcaagactctgtcatcggtgtgagtccagctgttatgatccgaagctcaagtcaggattctgaagtgagtaacagttcaggagagaccctcggagcagacagtgacctgagcagcaatgcaggtgatgggccaggaggcgaaggcagtgcccacttggcaagttctcgggctactctgtctgacagtgaaattgaaaccaattctgctacaagcaccatctttggtaaagcccatagcttgaagccaaaggagaagccggctagtagtccagttcgctcttccgaagatgtaagccagcgagtctatctctatgagggactactaggaagggacaaaggatccatgtgggaccagttagaggatgctgctatggagaccttttctataagcaaagagcggtctactttatgggaccaaatgcagttctgggaagatgcgttcctagatgctgtgatgttggaaagagaaggaatgggtatggaccagggccctcaggaaatgatcgacaggtacctgtccctaggagagcatgaccggaagcgcctggaggatgatgaagatcgcttactggccacactcttacacaacctcatatcctatatgctcctgatgaaggtgaacaagaacgacatcaggaagaaagtacggcgcctaatgggaaagtcccacgttgggctggtgtacagtcaacaaatcaatgaggtgctcgatcagctgaccaacctgaatgggcgtgatctctccatccgatccagtggcagcaggcacatgaagaagcagacgttcgttgtgcacgcagggacggacacaaatggagatatctttttcatggaagtgtgtgacgactgtgtggtcttacgtagtaacatcgggacagtgtacgagcgctggtggtatgagaagcttatcaacatgacctactgtcccaagaccaaggtcctgtgcttatggcgtagaaatggctctgagacgcagctcaacaagttctataccaagaagtgtcgggagctgtactactgtgtgaaggacagcatggagcgtgcggctgcccggcaacaaagcatcaaacccgggcctgaactaggtggtgagttccctgtgcaggacatgaagactggagagggcggcttgcttcaggtcaccctggaagggatcaatctcaagttcatgcataaccaggttttcatagagctgaatcacattaaaaagtgcaatacagttcgaggcgtctttgtcctggaagaatttgttcctgaaattaaagaagtggtgagccacaagtacaagactccaatggcccacgagatctgctattctgtgttgtgtctcttctcgtatgtggccgcagttcgtagcagtgaagaagacctccgaaccccacctcggcctgtctctagctgatagagaggggttacacagctgggccagcccaggggtcacccctcacctcttgctgctcctaagcgctgaagctgcctcgactgagacagagactctgtgtgtgtgtgtgtgtgtgttctctgcaaggtgttctctgcaagctccttcctgcggttgagctggtttcgttttatgtctgagtgtgtccttgtgttcatctgtcatggggctaagctagtctcattaccttctcttcctacaatagcagac

SEQ ID NO: 1104 - DNA, 571 bp, Rattus norvegicus
aaacaacatatgctcagtcctcccctgaacacaataactaaccatggaatggaactgggtctttctcttcctcctgtcagtaactgcagaagtccactcccaggtccagctgcagcagtctggagctgagctggcaaagcctggctcttcagtgaagatttcctgcaaggcttctggctacaccttcaccagctactatataagctgggtaaagcagaggactggagagggccttgagtgtcttggatatattaatacgggaagtggaggtactaactacaatgagaacttcaagggcaaggccacattgactgtagacaaatcctccagcacagccttcatgcaactcagcagcctgacacctgacgactctgcggtctattactgtgcaagaggtgcacaactgggctttgattactggggccaaggagtcatggtcacagtctcctcagagagtcagtcctccccaactgtcttccccctcgtctcctgcgagagccccctgtctgatgagaatttggtggccatgggctgcctggcccgggacttcctgcccagctccatttccttc

SEQ ID NO: 1105 - DNA, 549 bp, Rattus norvegicus
atgtcgggccgcacagtgccacacgcccacccagccactgccgagtacgaatttgccaaccctagccgcctgggcgagcagcgcttcggagaaggcctcctgccagaagagatcctgacccccaccctctaccatggctactatgttcggccccgggccgccagagctggggagggcggcagggcaggggcctcagagctcaggctcagtgaaggcaagttccaggcatttctggatgtgagccactttaccccagatgaggtgaccgtgaggactgtggacaacctgctagaggtgtctgcccgacacccccaacgtctggaccgccacggcttcgtgtcccgagagttctgtcgcacctatgtcctgcctgcagatgtggacccctggcgggtcagagctgctctctcccatgatggcatccttaacttggaggcaccgcggggtggccggcatctggacacggaagtcaatgaggtctacatctccctgcttcctgcacctcctgaccccgaggaagaggaagaggtagccagagttgaaccctga

SEQ ID NO: 1106 - DNA, 3348 bp, Rattus norvegicus
  misc_feature (1)..(3339): n = a or c or g or t
ctcgaggaaaactgcagctggtggtgttgagagacagcaagcagaccctcatcaacatcccatctctgaatgacagcgactcggaagtggaggatatctcggaaatcgagtccaaccgatctttttctccagaggagaggcgccagcagtattctgatcaggagtatcattcctccactgagaagctgaaggagaggccaagctcaagagaggagacctcaggcagaatgtccaggatgggtgccacacccacgccgttcaagtccacgggggacatcacagctgcaggtgtcacagaagccaacaaggaacccaggtcccaggaagaatccccagttcctcaacccagaacagcatcaagagtctttcttcgtcctagtcccgaaaatgaagcaatatatggccctaacaccaaaatggtgaagttcaagaagggagacagcgtgggcctccggttggctggtggaaatgatgttggcatatttgtggctggcattcaggagggcacctctgcagagcaggagggcctacaagaaggggaccagattctgaaggtgaacacacaagatttcagagggctggtccgggaagatgccgtcctctacctgttagaaatccctaaaggtgaaaccgtgaccattttggctcagagccgagcagacgtgtatagagacatcctggcctgtggcaggggagactcgttcttcataaggagccactttgaatgtgagaaggagactccgcagagcttggccttcaccaggggagaagtcttccgagtggtagacacgctgtacgatggcaaactgggccactggctggctgtgaggattggaaatgagctggagaagggcttaatccctaacaaaagcagagctgagcagatggccagtgtccagaatgcccagcgagagaatgctggggacagagcagacttctggcggatgcgtggccagagatccggggtcaagaagaacattcgcaagagccgggaagacctggcagctgctgtgtcggttagcaccaagttccccgcctacgaaaaggttctgcttcgggaagctggcttcaagaaacccgtggttctgtttggccccatagcagatatagcaatggaaaggctgactactgagctacccgacctgtttcaaactgcaaaaacagaacccaaagatgcgggatctgagaaatccagtggagtggttcggttgaatactgtgaagcaaattattgagcaggacaagcatgccctgctcgacgttacccccaaagctgtggacctgctccattatactcagtggttcccaatcgtgattttcttcaccccggattccagacaaggcattaaaaccataaggcagaagttgaacccaacatccaataaaatttctcgcaagttattcgatcaagcnaacaagtccaaaaaaacctgttctcatcttttaacagctaccatcaacgtgaattcagccaatgatggctggtttggcagcctgaaggacagcattcagcagcagcaacacgaagcagtgtgggtttctgaaggaaagatggaggggatggatgatgacgctgaagaccgcatgtcctacttaaccgccatgggtgcggactatctgagttgtgacagccgtctcatcagtgactttgaagatacggacggcgagggaggcgcctacactgacaatgagctggatgagccagctgaggagccgctggtgtcttccatcacccgctcctcagagccggtgcagcatgaggagagcataaggaagcccagcccagagccacgcgctcagatgaggagggcagctagcagagaccagcttagggatggtagcccgcccccagcattcaagccagagccgcccaaggtcagaaaccaaaacagagaggactctttcaactactccaagtcaaacttttctgccatggctggcagtgaaatcccggggggatccaccaaagggtgtcctccccctattgcggtgaaacctgcctttgggcgatccatcctgaagccttctactccagtccccatgcctgagagtgaggaggttggggagagcaccgaggagcaggaagaggctcccaaatcagtcctgggcagagtgaaaatcttcgagaagatggaccacaaggcgaaattacagaggatgcaggagctccaagaagcacagaatgcgaggattgaaatagctcagaagcatcctgacatctatgcggttccaatcaaagcccccaagccagatgctggcctgccccagcacatgagttctagacccccagagccacagaaagctccttctaggctttaccaggacaccagaggaagctacggcagtgatcccgaggaagaggaggagtaccgccaacagttggcagcacactcgaagcgtggttactacagccagccctcccggtaccgagacaccgaattatagagggccacttgtggactcctgcgagactccctggaggtcttctccagttaaaatgcactgcagagatacggtggggatccaggcaacagacagctcgaattatcaaccgaaggctctgttcgtgggactggagtaaagttggttatgactttttgaatgaagagaaacactatagcctgataatggttacttgctttggtgtggaccaaaaatctgtattaatctctctgtatttgtaatatgtatattgagcaataactccttctcctcgttcagagctgccttccagagctgcttcgatgtgaagcaaatgtgaacagggagtaaaaaaaaaaaaagtactccatctcaaactaaatccagaagtaatttatcacgactccctaagtgcctttgacaagatgtgtcttagtttgcttccctgaagctttatgcaaagctataatggactaaaacttttattttgactaaatttttataccagtttagcagctgtaactgccctcagcaccatgccaccttttcagggcattatcttgggagtgtggctattagttctacatagctcggaggccaagttttattagagtgtttgtccttgtttgtctgaaaccacgtgctccacaaagtcagaggcttgagaaaagggtattttatttccttcctatcagcatatgtactgacatcaggtggttttataatttaataaaaaggagtaccttgtggtcaagaatgagctttgtgctgaatntntacacaccttccttttgggctgtgtggggtggaatccaagatcctcatgcattcagagtgctgctccaccgctgaactataccccagacttcctgatttattttattttaattaaaaaaattaaaaagacttaaaaaaaaaaaaaaaaaaa

SEQ ID NO: 1107 - DNA, 804 bp, Rattus norvegicus
gcaagcagagccggagccgcccagttacagcgggacccgggcctctggggtccagacaggggtcgccatgatccgattcattctcatccagaaccgggcaggcaagacacgcctggccaagtggtatatgcagttcgatgatgacgagaagcagaagttgatcgaggaagtgcacgccgtggtcaccgtcagggatgccaagcacaccaactttgtggagttccggaacttcaagatcatctaccggcgctacgctggcctctacttctgcatctgcgttgacgtcaacgacaacaatctggcctatcttgaggccatccacaacttcgtagaagtgttaaatgaatacttccacaatgtctgtgaactggacctggtgttcaacttctacaaggtttacacggtggtagatgagatgttcctggcaggagagatccgagagacgagccagacgaaggtgctgaagcagctgctgatgctgcagtcgctggagtgaggcgggcctccgcccagcccggcctgctgggccaacctgcctgctcgtcccctgccaggctcgaggcccaccccagcagccccctcccttcctcagctggcccagaggagtgacccagcagggtctaggccacaggggaggaggccagaacccactgcctctgggccctacgtggatggcagaggccaccgtgatgtcccgagtaactgtgccattattgtgtgatgctgtgagtgtgcgtgtgtgcagcccccaataaacctgtggtcctgcctgaaaaaaaaaaaaaaaaaaaaaaaaaaaaaaaa

SEQ ID NO: 1108 - DNA, 270 bp, Rattus norvegicus
  misc_feature (1)..(270): n = a or c or g or t
atggcagtgaatgtgtactcgacgtcagtcaccagtgataacctcagtcgacatgacatgctggcttggatcaatgaatctctgcagttgaatctgacaaagatagaacagctatgttcaggggctgcatactgtcagttcatggacatgctcttccccggctccattgccttgaagaaagtgaaattccnggctaagctagaacatgaatatatccagaacttcaaaatactacaagccggcttcaagaagatgggcttgacaaaataa

SEQ ID NO: 1109 - DNA, 196 bp, Rattus norvegicus
  misc_feature (1)..(187): n = a or c or g or t
agtgagaantttatgtctwaaaataaatttttganaaatttcatcttttttggganagttctttctggtccaccttttacccaagggttattttaccttaaccccagttgtcttcagactttccggtgtctcctcctttgtcgtggcgaagcaacttgttaccgatcaattgaatgaaaaaaaaaaaaaaaaaaaa

SEQ ID NO: 1110 - DNA, 219 bp, Rattus norvegicus
  misc_feature (1)..(219): n = a or c or g or t
gagagagtgtttactttgatttaatcaaacttaaaatatttcatcaaattacccaggaaaatccaggtagcagaaatatataacatatccatttcttacaaggtcacaaatcagttttacaaggctatatatatatgtatgtatatgtactatgccatttaaaccacttccgctttctgtactgaagaactcgagwnwgaaataagctttgtggtgcta

SEQ ID NO: 1111 - DNA, 978 bp, Rattus norvegicus
atggcgagcagcagcggctccaaggccgaatttatcgtcggtgggaaatacaaactggtgcggaagatcggatctggttccttcggggacatttatctagcgatcaacatcaccaatggcgaggaagtggcagtgaaactagaatcccagaaggccaggcatccccagttgctgtacgagagcaaactgtataagattcttcaaggtggggttggcatccctcacatacggtggtatgggcaaggaaaagactataatgtgctagtcatggatcttctgggacccagcctcgaagacctcttcaatttctgttcaagaaggttcactatgaagactgtacttatgttagctgaccagatgatcagtagaattgaatatgtgcatacaaagaattttatacacagagacattaaaccagataacttcctaatgggtattgggcgtcactgtaataagttattccttattgattttggtttggccaaaaagtacagagacaacaggacaaggcaacacataccatacagggaagataaaaacctcactggcactgcccggtatgccagcatcaatgcacatcttggcattgagcagagtcgccgagatgacatggaatctttaggatatgttttgatgtattttaatagaaccagtctgccatggcaagggctaaaggctgcaacaaagaaacaaaaatatgaaaagattagtgaaaagaagatgtccactcctgttgaagttttgtgtaaggggtttcctgcagaatttgccatgtacttaaattactgtcgtgggctgcgctttgaggaagctccggattacatgtatctgaggcagctgttccgcatcctcttcaggaccctgaaccaccagtatgactacacgtttgattggacgatgttaaagcagaaagcagcccagcaggcagcctcttccagtgggcagggtcagcaggcccaaacccccacaggtttctaa

SEQ ID NO: 1112 - DNA, 429 bp, Rattus norvegicus
gtgaggcgaagctgagcaggaatggccctgtggacctctgtgatgggacatctggtggaatctcacaggcagttctgtggcaaagatggatgaaagctaaggactcatgaggaagctggataactgaacaaagccatgtacaagaatgggaagccagaaaatgggatggtggagtttgaatcaggtggacagttctaaaagtacaaatgatttcgtataaaggtaccacatgtgggtccctttaactgaaggcatggcaagctccacacaaggtccttcatttctgaatttcaagggctcctctgacaagtggacagtgcagtgggtgcaccttttccagaggtgactggatggatgcttgaacagaagatttgccaaatagacattgtgctgtcaagaattttaccattaaaagtgcattattgtagc

SEQ ID NO: 1113 - DNA, 1627 bp, Rattus norvegicus
catttctccctcacaaactggagcaaccggcgagcccggggcgggccctgtggcctcggtttggttcgtggagtcccagcggcagattcgctcggcaacgcggacagggccaattctgtcgcgtcaggaatcgcgggtgaagttcgccaccggtggagagaagacgttgagaaaagccgcgctgggctccctcaggggctcgtgcgcactcccagtttcggccttttcatgcaggaaatgaatctgctgccgacgcccgagagtccagtgactcggcaggagaagatggcgaccgtgtgggatgaagctgagcaagatggcattggggaggaggtgctcaagatgtccacagaagagatcgtccagcgcacacggctgctagacagcgagatcaagatcatgaagagtgaagtgctgcgagtcacccacgaactccaagccatgaaagacaaaatcaaagagaacagtgagaaaatcaaagtgaacaacaccctcccatacctagtctccaacgttattgagttgctggatgttgaccccaatgaccaggaggaggatggtgccaatattgacctggactcgcagaggaagggcaagtgtgcagtgatcaaaacttctacccgacaaacgtacttcctgccagtgattgggttggtagatgccgaaaagctgaagccgggagacctggtgggtgtgaacaaagactcctatctgatcctggagaccctgcccaccgaatatgactctcgggtgaaggccatggaggtggacgagcggcccacagagcaatacagtgacattggcggcctggacaagcagatccaggagctggtggaagccattgtcctgcctatgaaccacaaagagaagtttgagaacttgggtatccagcccccaaaaggagtgctgatgtatgggccgcctggtacagggaagactctcctcgcccgagcctgtgctgctcagaccaaggccaccttcttgaagctggcaggccctcagctggtgcagatgtttattggagatggcgccaagctggtccgtgatgcttttgccctggccaaggagaaggcaccatctattatctttatagatgagttggatgccattggcaccaagcgcttcgacagtgaaaaggcaggggaccgagaggtgcagaggaccatgctagagctcctgaaccagatggatggcttccagcccaacacccaagtgaaggtaattgcagccactaacagggtggacatcctggaccctgccctgctccgctcaggacgcctagaccgcaagattgagtttccaatgcccaatgaggaggcccgagccagaattatgcagatccactcacggaagatgaacgtcagtcctgatgtgaactatgaagagctggctcgctgcactgatgacttcaatggggcccagtgcaaggccgtgtgtgtggaggcgggtatgatcgcactgcgcaggggtgccacggagctcactcacgaggactacatggagggcatcctggaggtgcaggccaagaagaaagccaaccttcagtactatgcctagggacacctctagtctgtctgctggggcgggggctcggttgataataaagggggtttttgttcttttccca

SEQ ID NO: 1114 - DNA, 1038 bp, Rattus norvegicus
ggctgctaggcgccggccgaggcgaggcgccgcgcggaaaaccgcggcccggggggcggacccggcgggggaacaccgacgcggaggttccccccacacgcgcgggacacgcccgcccgcccccgccacgcacctcgggagaggcgatgggggggtggagcgaggccccgcggggaggggacccgcgccggcacccgccgggctccccgggagcggccgcgacgcccgccgcagctgaggcgatccacgggaagggcccggctcgcgtccagagtcgccgccgccgccggcccccccgagtgtccgggccccccgccccaccgggggcccgctggttcctcccgctccggaacccccgcggggttggacccgccgccccggagcccgcgccgcgcgccgacccccgacccgccccccgacgggaagaaggaggggggaagagaggtggcgacgacgcgggggacgacggggccccgcggggaagaggggagggcgggcccgggcggaaaggacggggggtctccccggacgtgggagagggcggcggcgcctcgtccagccgcggcgcgcgcccagccccgcttcgcgccccagcccgaccgacccagcccttagagccaatccttatcccgaagttacggatccggcttgccgacttcccttacctacattgttccaacatgccagaggctgttcaccttggagacctgctgcggatatgggtacggcccggcgcgagatttacaccctctcccccggattttcaagggccagcgagagctcaccggacgccgccggaaccgcgacgctttccaaggcacgggcccctctctcggggcgaacccattccagggcgccctgcccttcacaaagaaaagagaactctccccggggctcccgccggcttctccgggatcggtcgcgttaccgcactggacgcctcgcggcgcccatctccgccactccggattcggagatctgaacccgactccctttcgatcggccgagcctctgtcaagtcttggaccaagtaaaaat

SEQ ID NO: 1115 - DNA, 9316 bp, Rattus norvegicus
atggcgatgctgcctcctccaggacctcagagtttcgttcacttcacaaaacagtcccttgccctcattgaacagcgtatttctgaagaaaaagccaaggaacacaaagacgaaaagaaagatgatgaggaagaaggccccaagcccagcagtgacttggaagctgggaaacagctccccttcatctatggagacattccccctggaatggtgtcagagcccctggaggacctggacccatactatgctgacaaaaaaacttttatagtattgaacaaagggaaagcaatcttccgtttcaacgccacccctgctttgtacatgctgtctcccttcagtcctctaagaagaatatctattaagatcttagtgcactccttattcagcatgctaatcatgtgcacaattctgacgaactgcatattcatgaccttgagcaaccctccagaatggaccaaaaatgtagagtacacttttactgggatatatacttttgaatcactcataaaaatccttgcaagaggcttttgcgtgggagaattcaccttcctccgtgacccttggaactggctggactttgttgtcattgtttttgcgtatttaacagaatttgtaaacctaggcaatgtttcagctcttcgaactttcagagtcttgagagctttgaaaactatttctgtaatcccaggactaaagaccatcgtgggggccctgatccagtcagtgaagaagctctctgacgtcatgatcctcactgtgttctgtctcagtgtgtttgcactaattggactacagctgtttatgggcaacttgaagcataaatgtttcaggaaggaactcgaagagaatgaaacattagaaagtatcatgaatactgctgagagtgaagaagaattgaaaaaatatttttattacttggagggatccaaagatgctctactctgcggcttcagcacagattcagggcagtgtccagaaggctacatctgtgtgaaggctggcagaaacccggattatggctacacgagctttgacacattcagctgggccttcttggccttgtttcggctaatgactcaggactactgggagaacctttaccaacagactctgcgtgctgctggcaaaacctacatgattttctttgtcgtggttatttttctgggctccttttacctgataaacttgatcctggctgtggtagccatggcgtatgaggaacagaaccaggccaacatcgaagaagctaaacagaaagagttagaatttcagcagatgttagaccgactcaaaaaggagcaggaagaagctgaggcgatcgctgcagctgctgctgagttcacgagtatagggcggagcaggatcatgggactctctgagagctcttcagaaacctccaggctgagctcaaagagtgccaaggagagaagaaaccgaagaaagaaaaagaaacagaagatgtccagtggcgaggaaaagggtgacgatgagaagctgtccaagtcaggatcagaggaaagcatccgaaagaaaagtttccatctcggtgtggaagggcaccaccggacccgggaaaagaggctgtccacccccaaccagtcgccactcagcattcgcgggtccctgttttctgccaggcgcagcagcaggacgagtctcttcagttttaaggggcgaggaagagatctgggatctgagacagaattcgctgatgatgagcatagcatttttggagacaacgagagcagaaggggttcactattcgtaccccatagaccccgggagcggcgcagcagtaacatcagtcaggccagtaggtccccgccagtgctaccggtgaacgggaagatgcacagtgcagtggactgcaatggcgtcgtgtcgcttgttgatggaccctcagccctcatgctccccaatggacagcttcttccagaggtgataatagataaggcaacttccgacgacagcggcacgactaatcagatgcgcaaaaaaaggctctctagttcttacttcttgtctgaggacatgctgaatgacccgcatctcaggcaaagggccatgagcagggcgagcatactgaccaacactgtggaagaacttgaagaatctagacaaaaatgtccaccatggtggtacagatttgctcacacatttttaatctggaattgctctccatattggataaaattcaaaaagctcatctattttattgtgatggatccttttgtagatcttgcaattaccatttgcatagttttaaacaccttatttatggctatggagcaccacccaatgactgaagaattcaaaaatgtccttgcagtggggaacttgatctttacagggatcttcgcagctgaaatggtactgaagttaatagccatggacccctatgagtatttccaagtagggtggaatatttttgacagcctaattgtgacgctgagtttgatagagcttttcctagcagatgtggaaggattatcagttctgcggtcattcagattgctccgagtcttcaagttggcaaagtcctggcccacactgaacatgctcattaagatcatcggcaactcggtgggcgcactgggcaacctgaccctggtgctggccatcatcgtcttcatttttgccgtggtcggcatgcagctgtttggaaagagctacaaggagtgtgtctgcaagatcaatgtggactgcaagctgccgcgctggcacatgaacgacttcttccactccttcctcatcgtgttccgagtgctgtgtggggagtggatagagaccatgtgggactgcatggaggtcgcgggccagaccatgtgccttattgtttacatgatggtcatggtgattgggaaccttgtggtcctgaacctgtttctggctcttttgctgagttcctttagttctgacaatcttacagcaattgaggaagacaccgatgcaaacaacctccagatcgcagtggccagaattaagaggggaatcaattacgtgaaacagaccctgcgtgaattcattctaaaatcattttccaaaaagccaaagggctccaaggacacaaaacgaacagcagatcccaacaacaagaaagaaaactatatttcaaaccgtacccttgcggagatgagcaaggatcacaatttcctcaaagaaaaggataggatcagtggttatggcagcagtctagacaaaagctttatggatgaaaatgattaccagtcctttatccataaccccagcctcacagtgacagtgccaattgcacctggggagtctgatttggagattatgaacacagaagagcttagcagtgactcagacagtgactacagcaaagagaaacggaaccgatcaagctcttctgagtgcagcactgttgacaaccctctgccaggagaagaggaggctgaagcagagcccgtaaacgcagatgagcctgaagcctgctttacagatggttgtgtgaggagatttccatgctgccaagttaatgtagactctgggaaagggaaagtttggtggaccatcaggaagacgtgctacaggatagttgaacacagctggtttgaaagcttcatcgttctcatgatcctgctcagcagtggagctctggcttttgaagatatctatattgaaaagaaaaagaccattaagattatcctggagtatgctgacaagatattcacctacatcttcattctggaaatgcttctaaaatgggtcgcatatgggtataaaacatatttcactaatgcctggtgttggctggacttcttaattgttgatgtgtctctagttactttagtagccaacactcttggctactcagaccttggccccattaaatctctacggacactgagggccctaagacccctaagagccttgtctagatttgaaggaatgagggtagtggtcaacgcactcataggagcaatcccttccatcatgaacgtgcttctcgtgtgccttatattctggctaatatttagcatcatgggagtcaatctgtttgctggcaagttctatgagtgtgtcaacaccaccgatgggtcacgatttcctacatctcaagttgcaaaccgttctgagtgttttgccctgatgaacgttagtggaaatgtgcgatggaaaaacctgaaagtaaacttcgacaacgttgggcttggttacctgtcgctgcttcaagttgcaacattcaagggctggatggatattatgtatgcagcagttgactctgttaatgtaaatgaacagccgaaatacgaatacagtctctacatgtacatttactttgtcatcttcatcatcttcggctcattcttcacgttgaacctgttcattggtgtcatcatagataatttcaaccaacagaaaaaaaagcttggaggtcaagatatctttatgacagaagaacagaagaaatactataatgcaatgaagaagcttgggtccaaaaaaccacaaaaaccaattccaaggccagggaacaaattccaaggatgtatatttgacttagtgacaaaccaagcttttgatatcaccatcatggttcttatatgcctcaacatggtaaccatgatggtagaaaaagaggggcaaactgagtacatggattatgttttacactggatcaacatggtcttcattatcctgttcactggggagtgtgtgctgaagctaatctccctcagacattactacttcactgtgggttggaacatttttgattttgtggtagtgatcctctccattgtaggaatgtttctcgctgagatgatagagaagtatttcgtgtcccctaccctgttccgagtcatccgcctggccaggattggacgaatcctacgcctgatcaaaggcgccaaggggatccgcactctgctctttgctttgatgatgtcccttcctgcgctgttcaacatcggcctcctgcttttcctggtcatgttcatctacgccatctttgggatgtccaactttgcctacgttaaaaaggaggctggaattaatgacatgttcaactttgagacttttggcaacagcatgatctgcttgttccaaatcaccacctctgccggctgggacggactgctggcccccatcctcaacagcgcacctcccgactgtgaccctaaaaaagttcacccaggaagttcagtggaaggggactgtgggaacccatccgtggggattttttactttgtcagctacatcatcatatccttcctggtggtggtgaacatgtacatcgctgtcatcctggagaacttcagcgtcgccaccgaagagagcactgagcctctgagtgaggacgactttgagatgttctacgaggtctgggagaagttcgaccctgacgccactcagttcatagagttctgcaagctctctgactttgcagctgccctggatcctcccctcctcatcgcaaagccaaacaaagtccagctcattgccatggacctgcccatggtgagtggagaccgcatccactgcctggacatcttgtttgcttttacaaagcgggtcctgggtgagggtggagagatggattctcttcgttcacagatggaagaaaggttcatgtcagccaatccttctaaagtgtcctatgaacccatcacgaccacactgaagagaaaacaagaggaggtgtccgcgactatcattcagcgtgcttacagacggtatcgcctcagacaacacgtcaagaatatatcgagtatatacataaaagatggagacagggatgatgatttgcccaataaagaagatacagtttttgataacgtgaacgagaactcaagtccggaaaagacagatgtaactgcctcaaccatctcgccaccttcctatgacagtgtcacaaagccagatcaagagaaatatgaaacagacaaaacagagaaggaagacaaagagaaagatgaaagcaggaaatagagctttggttttgatacactgttgacagcctgtgaaggttgactcactcgtgttagtaagactcttttacggaggtctatgccaaactctttttatcaaaaaattctcaaaggcagcacagccattagctctgatccaacgaggcagagggcagcatttacacatggctatgttttgctttggtaaatgattcttttaagatttgagagtgtaactctgaagggaagagccatcactgcattcaagggtgacttagacattctaaaaatcagaaaaccaagtcaaacattttctcatttgcctccatgtcttttctctaggttctaaataaatgtgcacccatgtgaatctagaaatccaggcatacatgcacacatgcacacagtcacaaatacaaacaggattggctacgatttcaaattctatgtaaatgtttcactttggtttgcaatgaaatttccttgtaaaggaaatgggattagtgacgaaggttttgtcaaaacatcttattattagggaatcagaatctttaatctaaaaagaattcagtttatatttttgaggtgctgaaacttatcctacattgcgtcaaaagcaacttataggaatctataagatgtcatggaattgaaaaacgtatgtgggctatttatttaagaaatcactttcatttgtatattagcatcattcaccttgatttatggacatcttggacattgtgtggtcacatgatgctcccacaaaattgtttagctgaaacttcaggcacacatcacagagaacagctacccagtcttacgctccaccctgttcatacaataaccacagacctttaaacattatttggaatataaatattaggtttctcaatataaacatgtgaatattaacagaaaagttaatttacagcgttttacttactaatgtctatccaatctagtttgcacaatgagacagctctcacctcttacagccagttgccacatttctcttcttacgaagcttcggtttgtcagactttatctctaagcaaattctatgtttcctttttaatgaaacgtatcctgaaaagcgattagctacttgatactttagtgcttgtttgagcagatgactggagcatggtatgtaccccatcttttaaaatacaatccttaatgtgtttggcagcttcccaagttacagggaacgccgggcttttaatatctctccgttcaccaggtgttttgtatgaatgaaatgacattcaaagagtgagtctcattggcttgctttattaccaacgactttcctaaatgaggaactaatcctctgaagcactattatatccccttgtaaataacatagatgtcacttcgttcttaatattctaatccatggtgtgacatatattttgcattgatcagtaaagtagtctgggataaccattttaagagcatatacattttgaggtaggtgaagttaatctaccaaggattagaaacctactccaagtttttaaagtacttgataaaaatgaatgaccctgacaaattctctcataattttattccagcaatgtgaaatctttcctccaacactttatccttgcagagaagaaagaaaaaacaaagataagcccatgggccatgtaaacaaaggggctttatctagaagattctgagagaacctttgaagtaaatatgtaaaacatacttcctcagtttgcctttgaaattaaaaagtaacacaaaaatatggatttaataagtcatcaaaacacattctttatttctggcccagtttaaaggaaaggattaaaaatccctatagagggggggggacagagagagaaagagggagagaagaaacaaagtactagggacaaaaagattagacagaatacgtccaggttttcacactatgggctttgtccgggatgctgtataaaagtctctttccaaatgtttgtcataaggggatcgaagaaattaagtgcaagactaaaggttgtttacagatatcattaatcattaacagtttgggaagctgcttttacatttctatggaagatgccaaggaatgctaagccagacaatacagatgcattgtgcatctgtcaagcggctaaaatatgtttgggcaacttaattagggaaaccaccccaacccttacatttctgacaattttaaatacaatttaattaaagaaatcagtacttttattatttcacattcctaaaatataactatatcgtccatttttattgatattatatgtgtggatgtttgttgtagattatctgtaatttactattaatgtttttacactgatttttgtgaaaatttaaaatatgttggcaactggttcctcaacacaatttttttagcattacaaaaaataaacaggtataaaatttctcttttttctacatcatgttgaacatatttcattctgatttacacaattttaaatgtaatattattttatatgcatatgtttatctccaaaatcactacttatgacatcatatcaattaaaaatggtatttgacactaggactgtatttagtaaaagttaaaagctttcaccctttttcatgttgattagggtttgcactaactataaaatgtcacccacggaagctactagtcactgaaattattttacctattggtggagaatggtgactggccagaaaatatgagttagcattaagtagaagacagcgtacgtgaccacaaatccatgcaggtagtttgcgtgaaaacgggagaatctcatttttctgttttgtctcttctcactgtgcaaaaaggacaagaaatctttgggctatttctaaattcgaattgtcacaatttgcaatcataaatgtttagcacgactttgtagaattttgatagttttataaaagagtgaaaaacaaatgcatatgtaaataaagcagcccatactaacggattcatcaaatgttaatatgtaaataaagcagcccatactagcagattcatcaatgttaatatgtaaatacagcagcccacatgagcagattcgtcatatgctaagggaattaattaaaaggaagcaactaaataaggatggtcagtgattgatctgggtttagaacttgtgtttggacccaccaatttttaagtatgtattctcactttattagttttctaaagaaagcaatcaagaattgctcccagaaaatgagtaagtagccatgaatatatggatgctgtttaccaaacccatagacccatgaatgctccaaacgtctgagtttgtaaaaaaaaatacattgtagttatacttgacaatttaaaatgttaatagaatctaaaataaaagtcgcttaaaagtcgacgcggccgc

SEQ ID NO: 1116 - DNA, 576 bp, Rattus norvegicus
atgggaaagaagctggtgatggcccagaagcggggagaggctcgagccctttgcctgggtgtggccatggtggtgtgtgctgtcgttgcctactatatcctgggcacgaccatgctgcccctctaccagaaaagcgtgtggacccaggaatccacgtgccacctgattgagtccaacatcagggaccaagaggagctggagggcaaaaaggtgccccagtacccatgcctgtgggtcaatgtgtcagctgtgggccggtgggctgtgctgtaccacacggaggacactcgtgaccagaaccaacagtgctcctacatcccacgcagcctggaaaactaccaggtggcccgggccgatgtggagaaggtcagaacgaacttccacgagcatcggattttctactgcttctcaacgactcgggagaatgagaccactgtcctgtaccggcgcctctatggaccccagaccctgctcttctctctcttctggcccaccttcctgctgaccggtggcctcctcattatcgccatggtgaagatcaaccagtccctttccatcctggcggcccagaggtag

SEQ ID NO: 1117 - DNA, 2274 bp, Rattus norvegicus
atgtcatttgtagcaggagttattcggcgcctggacgagacggtagtgaatcgcatagcggcgggagaagttatccagcggccggccaatgctatcaaagagatgactgaaaactgtttagatgcaaaatctacaaatattcaagtgattgttagagaaggaggcctgaagctaattcagatccaagacaatggcactggaatcaggaaggaagatttggatattgtgtgtgagaggttcactacaagtaaactgcagacctttgaggatttagctatgatttccacctatgggtttcgcggagaggctttggcaagcataagccatgtggcccatgtcactattacaaccaaaacagctgatgggaaatgtgcatacagagcaagttactcagatggaaagctacaagcccctcctaaaccgtgtgcaggcaaccagggtaccctgatcacggtggaagaccttttttacaacataatcacaaggaagaaagctttaaaaaatcccagtgaagagtacgggaagattttggaagttgttggcaggtactcaatacacaattcaggaattagtttctcagttaaaaaacaaggcgagacagtctctgatgtcagaacactacccaatgccacgaccgtagacaacattcgctccatctttggaaatgctgttagtcgagaactgatcgaagttgggtgtgaggataaaaccctagctttcaaaatgaatggctatatctcgaatgcaaactactcagtgaagaagtgcattttcctactcttcatcaaccaccggctggtggaatcggctgccctgaagaaagccatagaagctgtatatgcagcatatttacccaaaaacacgcacccattcctgtacctcattttggaaatcagtccccagaacgtggatgtcaatgtgcaccccaccaagcatgaagttcactttctccatgaggagagtattctggagcgtgtgcagcagcacatcgagagcaagctattgggctccaattcatccaggatgtattttacccagaccttgcttccaggacttgctgggccctctggggaagccgttaaatccacgacaggcatagcttcctcatctactagtggaagtggcgacaaggttcacgcttaccaaatggtccgtacagactctcgggaccagaagctcgatgcctttatgcagcctgtaagcaggcgtctgcccagccagccccaggaccctgtccctgggaacaggacagagggctctcctgaaaaagccatgcagaaggatcaggagatatctgagctcccggcccccatggaagcagctgctgacagtgcgagtttggagagagaatcagtgattggggcttcggaagtggtggcaccccagcggcacccctccagtccaggcagctccagaaagagacatccggaggactccgatgtggaaatgatggaaaatgattcccggaaggaaatgacagctgcttgctacccccggaggaggatcattaacctcaccagtgttttgagtctccaggaagaaattaacgaccggggtcatgagactctccgggagatgctccgtaaccatacctttgtgggctgtgtgaatcctcagtgggccttggcacagcaccagaccaagctctacctcctcaacactaccaagctcagtgaagaactcttctaccagatactcatttacgattttgccaacttcggtgttctcaggttaccggaaccagcaccactctttgacttcgccatgctggccttagatagtcctgaaagtggctggacagaggaagatggcccaaaggaaggacttgcagaatacattgttgagtttttgaagaagaaagccaagatgcttgcagactatttctctgtggaaattgatgaggaagggaacctgattggattacctctcctgattgatagctatgtgccgcctttggagggactgcctatcttcattcttcgactggccactgaggtgaactgggatgaagaggagtgtttcgaaagtctcagtaaagaatgtgctgtgttttactccattcggaagcaatacatactggaggagtcagccctctcaggccagcagagtgacatgcctggctccccttcaaagccctggaagtggactgtggaacacattatctataaagccttccgctcacaccttctgcctccgaagcatttcacagaagatggcaatgtcctgcagctcgccaacctgccagatctgtgcaaagtcttcgaacgctgctaa

SEQ ID NO: 1118 - DNA, 3752 bp, Rattus norvegicus
ctgagcactgtctggaaagcccacgaggaacggcgcaaggcatcgagagcccgtgggctgggcagtgcggagcagggcctggcgctgaggatggccaggcagcaggcgccaccctgggtccacgtagccctcatcctcttcctcctcagcctcggaggggccattgagattccgatggatctgacccaacccccaacgatcaccaagcagtcggtgaaggaccacatcgtggacccccgagataacatcctgattgaatgtgaagctaaagggaaccccgcccccagtttccactggactcgcaacagcaggttcttcaacattgccaaggacccacgggtgtccatgaggaggaggtctgggaccttggtgatcgacttccgcagtggtgggcggcctgaggagtacgaaggggagtaccagtgctttgcccggaacaaattcggcacagctcttagcaaccgcatccgcctgcaggtgtccaaatctcccctgtggcccaaggaaaacctagaccccgtcgtggttcaagagggtgcccccttaaccctgcagtgcaaccccccacctggcctcccatcccccgtcatcttctggatgagcagctccatggagcccatcacccaggacaagcgtgtctcccagggtcacaacggggacctgtacttctccaacgtcatgctgcaggacatgcagaccgactacagctgcaatgcacgcttccacttcacccacaccattcagcagaagaatcccttcaccctcaaagtcctcaccaacaacccctataatgactcgtctttaagaaaccaccctgacatatatagtgcccgaggagttgcggaaagaacacctagcttcatgtatccccagggcacgtcaagcagtcagatggtactgcgcggcatggacctgctgctggagtgcattgcctctggggtcccaacaccagatattgcatggtacaagaaaggtggggacctcccatctgacaaggccaagttcgagaattttaacaaggctctgcgcatcaccaatgtctctgaagaggactctggggagtatttctgcctggcctccaacaagatgggcagcatccggcacacgatctcggtgagagtaaaggctgccccatactggctggatgagcccaagaacttgatcctggctcctggtgaagatgggaggctggtgtgtcgagccaatgggaacccgaagccgaccgtccagtggctggtgaatggagaccctttgcaatcggcaccacccaaccccaaccgtgaggtggccggagacactatcatcttccgggacactcagatcagcagcagggcagtgtaccagtgtaacacatccaacgaacatggctacctgctggccaatgccttcgtcagcgtattagatgtaccccctcggatgctgtctccccggaaccagctcatcagggtgatcctttacaaccggacgcgactggactgtccgttctttgggtctcccattccaacactccgatggtttaagaatgggcaaggaagcaacctggatggtggtaactaccacgtctacgaaaatggcagcctggaaatcaagatgattcgcaaagaggaccaaggcatctacacctgtgtggccaccaacatcctgggaaaagctgaaaatcaagtccgcctggaggtcaaagaccccaccaggatctacaggatgcctgaagaccaggtggccaagaggggcaccacagtgcagctggagtgccgtgtgaagcatgacccctccttgaaactcacagtctcctggctgaaggatgacgagccactctacattggaaacaggatgaaaaaggaagatgactccctgaccatcttcggagtggcagagcgggaccaaggcagttacacgtgcatggccagcaccgagctggaccaggacctggcaaaggcctacctcactgttctagggcggccagaccgacccagggacctggagctcactgacctggcggaaaggagtgtgaggctgacctggatcccgggggatgataacaacagtcccatcacagactacgttgtccagtttgaagaggaccagttccagccaggagtctggcatgaccactccaagttcccaggcagtgtcaactcagccgtcctccatctgtccccgtatgtcaactatcagttccgagtcatcgctgtcaacgaggttgggagcagccaccccagccttccatccgagcggtaccgaacaagcggggcaccccctgaatccaaccccagtgatgtgaagggcgaagggacacgaaaaaacaatatggagatcacatggacgcctatgaatgctacctccgcctttggccccaacctgcgctacattgtcaagtggcgacggagagaaacccgagagacttggaacaatgtcaccgtgtggggctctcgctatgtggtggggcagacccctgtctacgtaccctatgagatccgagtccaggctgaaaatgactttgggaaaggcccggagcctgaaaccgtcattgggtactcgggggaagattatcccagggctgcacccactgaagttaaaatccgagtcctgaacagcacagccatcagccttcagtggaaccgcgtctaccctgacacggtccagggccagctcagagagtatcgagcttactactggagggaaagcagtttgctgaagaacctgtgggtgtctcagaagagacagcaggccagcttccctggcgaccgcccccggggcgtggtgggtcgcctgttcccctacagtaactacaagctggagatggttgtggtcaatgggagaggtgatgggcctcgaagtgaaaccaaggaattcaccaccccggaaggagtacccagtgcccccaggcgtttcagagtccgacagcccaacctggagaccatcaacctggaatgggatcacccagagcaccccaacgggatcctgattggatacacgctcagatacgtgccctttaatggaaccaaactgggaaagcagatggtggaaaacttctctcccaatcagaccaagttctcggtgcagagagcagaccccgtgtcccgttaccgcttctccctcagtgccaggacgcaggtgggctctggagaagcagccacggaggagtccccaacacctccaaatgaagctactccaactgcagcttacaccaacaaccagactgacatcgccacccagggctggttcatcgggctcatgtgtgccattgcccttctggtgctgatcctgctgatcgtctgcttcatcaagaggagtcgtggcggcaagtacccagtgcgagaaaagaaggatgtccccttgggccctgaagaccccaaagaagaagatggttcatttgactacagtgacgaggacaacaagcccctgcagggcagccagacatctctggacggcaccatcaagcagcaggagagtgacgacagcctagtggactacggcgagggtggcgagggccagttcaacgaagatggctcctttattggccagtacactgtcagaaaggacaaggaggagaccgagggcaatgagagctcagaggccacatctccagtcaatgccatctattccctggcctgatggagcatcccaggcacagcactactttgcaagtaggaggggagaggggagaggaagccactgcagacctgccaccaagccacaacaccttcagggacaagggtacaacatgggggtctgccaagctgtgaggacca

SEQ ID NO: 1119 - DNA, 1830 bp, Rattus norvegicus
tggcgagttatggagcgcgctctcccggcggccggcttcctatactgggtgggcgcgagcaccattgcttacctgaccctgcgagcctcgtactcgctcttcagggccttccaggtgtggtgcgtgggcaaccaggcctttgtcggcccgcggctcggagaatgggcagttgttacaggtggcactgatggaattggaaaatcatatgcagaagagttagcaaagcgtggaatgaagattgtcttgataagcagatcccaggataaactgaaggaagtttccaacaacatcaaagaaaaattcaacgttgaaacaaggaccattgctgtcgacttttcattggatgatatttatgataaaattaagacaggcctgtctggtcttgaaattggcgttttagtgaacaacgtgggcatgtcatacgagtatccagaatactttttggaaattcctgacttggacaacaccatcaagaaactgataaatattaatgtgctttccatttgcaaggtgacacgcttggtgctgcctggcatggtagagagatctaaaggggtgattctcaacatctcctctgccagtggcatgctcccggttccactgttgacagtctactctgcaaccaaggcctttgtagatttcttctctcagtgcctccatgaggagtataagagcaagggcatctttgtgcagagtgtcctgccattctttgtatctacaaaactggcaaaaatacggaagccgactttggataagccctctgcagagacatttgtgaagtctgcaattaaaacagtaggtctgcagacccgaaccactgggatatgtgatccacgccatcatgggctcaataaactcaatcttgccccgttggatttattttaaaacgatcatgggtttcaacaagtctttgcggaatcgctatctgaagaaaaccaagaagaactaagttctgctgggtcatcgagctccttggccagacgcttgacctgtgcttgcatactgggcccctgcctgtccccagagtctctactgtcatctcagtaattactaacatggcatagctggcggaaagcaaattccttttagaggttcctaacatatattctggatacaaccaggagtaatttgaagtttaatataaatgttcttggcaaatgtatgtataccactttgacagaaaggaacagatcccagaatgacagacgtagcacccatccggcccagaatgccaatgattacctaatatttggtctggaacctactataaagtgtaatagctagctacttttttatttttaacattaaagggaatggggcttagttgattttttttttatgggcagatacaatgcagtttacattgatttctgtaaggttttctaaaggtatgttccagcttatgtgtttctatggaactggtcttcttaaaagtagctaagaaagacataaagagaattgaaacacggagttctttctaacacagaagtccacaaaatgttattcttggaacacacattatgtctgctctgttccatgtatgtaaatactgaatgctatatagtgtgactgaaatgtaaaggtaagtgggcccaagtgtacatcaagaccagcaacatcctgtggtactgtgggatccagaagagcagcctgcctggatatccagtgttggtcatgtctgtactgcacccatactatttgcctaggatgacagactccttctgtggtagtgaggggtcatggaaacatgttctttttaagttggtgtctcatttgaattcatatatccacttttaataaaagatgatgtaaccgcaaaaaaaaaaaaaa

SEQ ID NO: 1120 - DNA, 564 bp, Rattus norvegicus
gcgcgcgcgcaccgcgggcgatggcggcatccggggagcaggctccatgctccgtgtacttctgcgggagcatccgcggcgggcgcgaggaccaagcactgtatgcgcggatcgtgtcgcggctccgacgctatgggaaggtgctcactgagcacgtggctgatgctgagttggagccgcttggggaagaggctgctgggggtgaccagttcatccatgagcaggacctgaactggctgcagcaagcagatgtggtagtggcggaagtgacacagccatccttgggtgttggctatgaactgggccgggcagtagctcttgggaagccaattctgtgcctgtttcgaccacagtctggccgagtgctttccgccatgatccgcggagcagcagatggctcgaggttccaggtatgggactacgcagaaggagaagtggagaccatgctcgatcggtactttgaggcatatcttcctcagaagacggcttcctccagtcacccaagtgcctgaccaccctactgtattaaaaagaaaattaagatttaaaaaaaaaaaaaaaaaa

SEQ ID NO: 1121 - DNA, 5957 bp, Rattus norvegicus
cttgcacactgccgtggtttggaagaagcgaacactgaagacgctactgttgttaatgaccatcttcctgctgtcagggtaacctggtccctgacataaggagaccccaggcagggaacgtctccctagagggcagttccccttctggaaggcagaaagcgagcggctgaacgcccgggacacgcagcgggaccgggacagcatcgcggagccagcgggatggagggcgggaggacgcgcggcggctgcggcggcggcggtggtggtggtgaggcggcctgaggtgttccggcccagcgggtcgcggagaggagccgccgcgatcatgtcggcgggcggccgcgacgaagagcggcggaagctggccgacatcattcaccactggaacgccaaccggctggacctgttcgagatcagccagccgaccgaggatttggagtttcatggagtcatgagattttattttcaagataaagctgctggaaactttgcaacaaaatgtattcgggtctctagcacagcaaccactcaagatgtcattgaaacactggcagagaagttccgccctgatatgcgcatgctctcctctcccaagtactccctctatgaagtgcatgtcagtggagaaagaagattggacattgatgagaaacctctagttgtacagttgaattggaacaaagatgatcgggagggtagattcgtccttaagaacgagaatgacgccattcctgccaagaaggctcagagtaatggacctgagaagcaggagaaagaaggtgttattcagaacttcaaaagaactctgtcaaagaaagaaaagaaggaaaaaaagaagagagagaaggaggctttgagacaagcctctgataaggaagaaaggccttctcaaggggatgacagtgagaattctcgtctggctgctgaagtttacaaagacatgcctgaaaccagctttactcgaacgatttctaatcctgaagttgttatgaaacggcggcggcagcaaaaactggagaagagaatgcaagagtttcggagctcagatgggcggcccgactcgggtggaacactgagaatctatgcagacagtttaaaaccaaatattccatacaagacaatcctgctgtctactacagatcctgcagactttgctgtagcagagtccttagagaagtatggtctggaaaaagagaaccccaaggactactgcattgctcgggttatgcttcctcctggagcccagcattctgatgagagaggtgctaaggaaataattcttgatgacgatgaatgccctttacaaatcttcagggaatggccaagtgacaaagggattttagtctttcagttgaagaggagaccaccggactacattccaaagaaaatgaagaaacatgttgaaggcaagccattgaaggggaaagatagagctgacgggtctggctacggctctgctcttcctcctgagaagctgccctacttagtagagctcagcccagggagaaggaatcactttgcctactacagctatcacacttacgaagatggctctgactccagagacaagccaaagttataccgccttcagttaagtgtgactgaagttgggacagagaagttcgatgacaattctattcagctgtttggtcctggaattcagccccatcactgtgatctcaccaacatggatggagtggtcactgtgacacccagaagtatggatgcagagacctatgtggatggtcagcgcatctcagagaccacaatgctacagagtggcatgagactgcagtttggcacctcgcatgtgtttaagtttgtggaccccatccaggaccacgttctttccaagagatctgtggatggaggcctgatggtcaagggcccaagacataaacctggagccgttcaagagacaacctttgaattgggaggagatatccacagtgggacagcattgccggcaagcaggagcactactagattggacagtgacagggtgtcctctgcctctagcacagctgagcgagggatggtgaagccaatgatccgactggaccaggagcaggactaccggcgaagagaaagcaggactcaggatgctgctgggcctgaactgatgctgcctgccagcattgaattccgggaaagctctgaagactcttttttatctgccattataaactataccaatagctctacagttcattttaagttgtcacctacatatgtgttatacatggcatgccggtatgtattgtccagccagcacaggcccgacatcagtcctacagagcggacacataaggccattgctgttgtgaacaagatggtgagcatgatggaaggggtcatccaggaagtagaccaggttgatcagaaacagaagaacattgcaggagcacttgctttctggatggcaaatgcatctgagcttctcaacttcatcaagcaggaccgagaccttagtcggattactctggatgcccaggatgttctagcacacttggttcagatggcatttaagtacttggttcactgccttcagtcagaacttaataactacatgccagcctttctggatgatcccgaggagaacagtctgcagagaccaaaaatagatgatgtgctgcatacgctcacaggagccatgtccttgttgcggcgctgcagagtcaatgccgccttgaccatccagctgttctctcagcttttccacttcatcaatatgtggctattcaacagactggtgactgacccagattcaggcctgtgttcccactactggggcgcaattatccgccagcagctggggcatattgaagcttgggcagagaagcagggactagagttggcagctgactgtcacttgagcaggatcgtgcaggctactacgttgcttacaatggataagtatgtacctgatgacattccaaatataaacagcacatgctttaagttaaattctctgcagcttcaagccctcttacagaattaccactgtgcacctgatgagccttttattcctacggatctcatagaaaatgtcgtggctgttgctgagaacacagctgatgagcttgcccgcagtgatggcagagatgtgcagttagaggaggaccctgatctacaactgccctttcttctgccagaagatggctattcctgtgatgttgtcagaaacattccaaatggtttacaagaatttttagaccctctgtgccagagaggattttgcaggttggttcctcacacacgttctccaggtacctggacaatatattttgaaggagcagattatgaaagtcacctcatgcgtgagaacacagaactgacccagcctctgaggaaggagcctgaggtaatcactgtgaccctgaagaagcagaatggaatgggcctcagcattgttgcagcaaagggtgctggccaggataaactgggaatctacgttaagtccgttgtcaaaggaggtgctgcagatgtggatggacgcctagctgctggtgaccaactccttagtgtggatggacgaagtctggttggactttctcaggaaagggcagcagaactcatgacaagaaccagttccgtggtaacactggaagttgcaaagcaaggcgctatctatcacggactggccactctccttaaccagccatcacccatgatgcagagaatttcagatcgtcgtggctcaggtaaacccagaccaaagagcgaaggttttgagctctataataattcagctcaaaacggctccccagagagtcctcagatgccttggacagagtacagtgagccaaagaagctgcctggtgacgacaggctgatgaaaaacagagctgaccaccgttccagccccaatgtggcaaatcagccccctagtcctggagggaagagtccatatacctctggaacagcagctaaaataacatctgtctctactggaaacctctgcactgaggagcagacccctccacctagacctgaagcctatcctatccctactcagacatataccagagagtattttacctttccagcttcaaagtcgcaggatcggatggctcctgttcaaaaccagtggccaaattatgaggaaaaaccacacatgcacacagaaagtgatcatgccagtattgcaatccagcgtgttacccgttcccaggaagagcttcgggaagagaaggtttaccaacttgagcgtcatcgagtagagtcaggcatggatcgcaagtgtgacagtgatatgtggatcaatcagagctcctcagtggaatctagcacgtctagccaggagcacctgaaccattcctccaagtcagttacccctgcttccactctgaccaagagtggtcctggtcgttggaaaaccccagcagctgtgctccccacccctgtggctgtctcccaacccattcgaacagacctccctccaccaccacctccaccacctgcccactacaccagtgattttgatggtatttcaatggatttgcccctcccacctcctcctgccaaccaagcagctccccagtctgctcaggtggctgctgcagagaggaaaaagagagaggagcatcagaggtggtatgaaaaagagaaggcccgcctggaggaggaacgagagagaaagcgcagggagcaagagaggaagttggggcagatgcgcactcagtccctgaaccctgcttccttctctcctttggccacacaggccaagccagaaaagccttccacactgcagaggccccaagaaacggtcattcgggagctgcagccccagcagcagccccgtactattgagcgcagggatctgcagtacataaccatcagtaaagaggagctgtcctctggggatagtctgtctccagacccatggaaacgagatgccagggagaagctggagaagcaacagcaaatgcacattgtagacatgctaagcaaggagatccatgagctgcaaaacaagggggaccgtactgcagaggagagtgaccgcctgcggaagcttatgctggagtggcagttccagaagagactacaggagtccaagcagaaggatgaggatgatgatgaagaggaagatgatgatgttgacaccatgctgatcatgcagcgactggaggcggagcggagagccaggttgcaggatgaagagcgcaggcgccagcaacagttggaagagatgcgcaaacgagaagttgaagacagagtaagacaagaggaagatggacgccatcaggaggaggagcgagtaaagagagatgctgaagaaaagaggcgacaggaagaagggtattacagccgcctagaagctgagaggcgcagacagcatgaagaggcagcacgcaggttgctggagcccgaagaacccgggctgagccgacctccacttccacaggactacgagcccccatcccagtcctcagcacccagtgcccctcctcccccacctcagcgaaatgcctcctacctcaaaacacaggtcctctccccagactcgctgttcactgccaagtttgttgcgtatgatgatgatgatgaggaggagaactacgtcccagcaggaccaaactcttattcgggatctgctggcacaactgctggaacttatgatgctcctcgggacacaagagaaaaactcagtagaagccaagatgcagacttacctggcagttctggagcccctgaaaacctgacatttagagagcgtcagcgcctcttttcacaaggtcaagatgtgtcagacaaagtgaaagcttctcgtaaattaacagagcttgagaatgaactcaacaccaagtgagaagagagaggtcacctgtactcaagcaggtctgaccttggcagtggatttgtggggtgggcctgaagaggaaggaacaattgtacttctaagtgatgtttaatttctttctgaaatggttgcaattgagagatgttccaaa

SEQ ID NO: 1122 - DNA, 496 bp, Rattus norvegicus
aaattggggcatttgtgcaatgagcctttggatatgtatagctatttacacagccaaggcattggcatttccctggcccagttctatatctcgtgggctgaagagtacgaagctagaggaaatttcaagaaagcagatatagtattccagcaagggattgaatgcaaggcggagcccctggacagactgcagtcccagcacagacagttccaggctcgagtgtctcggcaagctctcttggctcttgggaatgaagaggaggaggtcttggggtcctctgaaccacaaagaagcacgctcgctgagctgaagagcagagggaagaagatggccagagcgcccatcaaccgtgttggaggtgctctgaaggctccaggtctgagcagaggattcctaaatgcacttcctcagccagtacacaacaatcgcaagatctgttcatggatagtcgacgtcggtaagccgaattccagcacactggcggccgttactagtg

SEQ ID NO: 1123 - DNA, 2400 bp, Rattus norvegicus
ggtgaggccgactgactccgttctagctggaggttcctgacttccctgctcgccgacccctggcgtgtgacgaccgatctcaggctgagcaatggcgtttcaaaaggtagtgaaagggactattcttatgggtggaggagctctggccactgttttgggactctctcagtttgctcactacagaaggaagcaagtaagcctggcgtatgtggaagcagcaacatgcttctcagagcccgtgaacagggagcctccttccagagaagctcagctcatgactctgcagaacacatcggaatttgacatcctcgtcattggaggaggagccacaggatgtggctgtgcgctagacgccgtcaccagaggactgaaaacagcccttgtagagagaaatgacttcgcatcagggactagcagcagaagcactaaattgatccatggtggcgtacgatacctccagaaggctatcacgaacttggatgttgaacagtataggatggtgaaagaggcccttcatgaacgtgccaacttactagaaatcgctccccatctatcagctccgctgcctataatgctgccactttataagtggtggcagttaccttattactgggtgggaatcaagatgtatgatctggttgcaggaagtcattgcctgaagagcagttatgtcctcagtaaatccagagcccttgagcatttccccatgctccagaaggacaagctggtcggagccattgtctactatgatggacagcacaatgacgcccggatgaacctcgccatcgccctcaccgctgccaggtacggggctgccacggccaattacatggaggtggtgagcttgctcaagaagacagaccccgaaactgggaaagagcgcgtgagtggtgcccggtgcaaggacgtgctcacagggcatgagtttaacgtgagagctaaatgcgttatcaatgccaccggccctttcacagactccgtgcgcaaaatggatgataacgatgttgttcccatctgccagcccagtgcaggggttcacattgtgatgcccgggtactacagccccgagaacatgggacttcttgatcctgcaaccagtgatggcagagttattttcttcttgccttgggagaagatgacaattgcgggtaccactgattcgccaacggacgtcacgcaccatcctattccttcggaagacgacattaacttcatcttaaatgaagtgcggaactacctgagttgcgacgttgaagtgagaagaggggatgtcctggcagcgtggagtggcattcgcccgcttgttaccgatcccaagtctgcaaacactcagtccatctctcgaaatcatgttgtggaagtcagcgacagtggcctcatcacaatagcaggtgggaagtggaccacatatcgctccatggcagaagatactgtgaacaaagctgtcaagcttcacaacttgaatgcaggacccagtaggaccgttgggctcttccttcaaggaggcaaagattggagccccacactctacatcaggcttgtccaggactatgggcttgagagtgaggttgcacaacacctggccaaaacctatggtgacaaggctttcgacgtggccaaaatggcaagtgtgactggaaaacggtggcctgttgttggagtgcgtcttgtgtcagaatttccgtacatcgaagcagaggtgaaatatgggattaaggagtacgcatgcaccgctgttgacatgatttcacgtcgcacccgcctggcctttcttaatgttcaggctgcagaggaagccctgcccaagattgttgagttaatgggaagagaattgaactggagtgaattgaggaaacaggaagaacttgaaacagccacgaggtttctgtactatgaaatgggctataagtctcgaacagaacaactcacagatagtactgaaatcagcctgctgcctccagacatcgatcggtacaagaagagatttcacatgtttgatgaagacgaaaaaggcttcattaccattgttgatgttcaacgtgtgctagagagtatcaatgtacaaatggacgaagacacactacatgaaattctctgtgaagtagacttgaacaagaatggtcaggttgagctccatgagtttctgcagctgatgagcgcagttcatacaggaagggtgtctggaagccggcttgccatcctcatgaagactgccgaggagaacttggaccgtagagttccaatccccgtggatcgtagttgtggaggattgtgagtctgaccaataaatccacaaccaacaagcctaggacagtcagcactatgtacaaccagagacgacttaaaccactctaaaatagtggccattgtagctgcctttttttttttttttttttaaaa

SEQ ID NO: 1124 - DNA, 1561 bp, Rattus norvegicus
gcgggccccaccggccgggcggttgggccgtgaagggagagtcttttcggcgctgaggacgggcgctgaggaggcggcggtggctcctggggcgtttgagcgggctcactcgagcccgcgggccgacgcggacgcaggcccagccggcggaaacgccccggactccccgcgggccttcctagccgccatggaggacggtgtctacgagcccccagacttgactccagaggagcgcatggagctggagaacatccgtcggcgaaagcaggagctgctggtggagatccagcgcctccgggaagagctaagtgaagctatgagcgaagtggagggtctggaggccaatgagggcagtaagaccttgcagcggaaccggaagatggcaatgggccggaagaaattcaacatggaccccaaaaaggggatccaattcttggtggagcatgaacttctacagaacacacctgaggaaattgcccgcttcctgtacaagggcgaggggctgaacaagacagccattggggactacctaggggaaagggaagagctgaacctgtctgtgctccatgcttttgtggatctacatgagttcaccgacctcaatctggttcaggccctccggcaattcctgtggagctttcgcctccctggagaggctcagaaaattgaccgaatgatggaggcctttgcccagagatattgcttatgtaatcccggggtcttccagtccacagacacctgctacgtgttgtccttcgctgtgatcatgctgaacaccagccttcacaatcccaatgtcagggacaagccgggcctggagcgctttgtggccatgaaccgaggcatcaatgagggtggggacctgcctgaggaccttctcaggaacctctatgacagcatccgaaacgagcccttcaaaatccctgaggatgatgggaatgatctcacccacaccttcttcaacccagaccgagagggctggctcctaaagctgggagggggccgggtgaagacttggaagcgtcgctggttcatcctcacagacaactgcctctactactttgagtacactacggacaaggagcccagagggatcatccccctagagaacctgagcattcgtgaggtggatgatcctcggaagccgaactgctttgagctttacattcccaacaataagggacagctcatcaaagcctgcaaaacggaggctgatggtcgggtagtagaggggaaccacatggtgtaccgaatctcagcacccacacaggaggagaaagacgagtggatcaagtccatccaggctgctgtaagcgtggaccccttctacgagatgttggcagcaagaaagaagcggatttctgtgaagaagaagcaagaacaaccctgaccctgtccccaactccattatttattttggagctgccccgcctgggtggcaggacccctgggccctggggctgtggatcctggttccctgtttggaaaatcaccacctctagctcctgactccttatttgtaattaacatgttggtaatcttattaattatttaacccctc

SEQ ID NO: 1125 - DNA, 946 bp, Rattus norvegicus
  misc_feature (1)..(946): n = a or c or g or t
atggcggcgacggcgagtcccggggctggccggatggacgggaaaccccgtacctcccctaagtctgtcaagttcctgtttgggggcctggctgggatgggcgctaccgtttttgtgcagcccctggacctggtgaanaaccggatgcagttgagtggtgagggcgctaagactcgagagtacaaaaccagtttccatgccctcactagcatcctgaaggcagaagggctgaggggcatttacactgggttgtcagccggcctactgcgccaggccacctacaccactacacgtcttggtatatatacagtgttgtttgagcgcctgactggggctgacggtacaccccctggctttctcctgaaagccctgattggcatgactgcaggtgcaactggtgcatttgtgggaccaccagctgaggtggccctcatcaggatgactgctgatggccggcttccagctgaccagcgccgtggctacaaaaatgtgtttaatgccctaattagaattgcaagggaagaaggagtccccacactgtggcggggctgcatccctaccatggctcgagctgttgtcgtcaatgctgcccaacttgcttcttactcccaatccaagcaattcttgctggactcaggctacttctctgacaacattctgtgccacttctgcgccatcatgatcagtggcctggtcaccactgctgcttccatgcctgtggatattgtcaaaactaggatccaaaatatgcgaatgattgatgagaagccagagtacaagaatgggctggatgtattgctgaaagtcgtccgctatgagggtttcttcagcctgtggaagggcttcacaccatactatgcccgactgggcccccacactgtcctcaccttcatcttcttggaacagatgaacaaggcctacaagcgtctcttcctcagtggctgag

SEQ ID NO: 1126 - DNA, 1572 bp, Rattus norvegicus
atgagtttccgcaaggaggacggggtgagcagcctgtgccagaaggcgctgcacatcatcaccgagctgtgcttcgcgggccaggtggagtgggacaagtgttcgggcatctttccagccgataggagcggccagggcggaggtggcacagacatttcagtcagcctgttagcagttgttgtaagcttctgtggcctggccctgctggttgtctcccttttcgtcttctggaagttgtgctggccctgctggaagagcaagctcgtggcccccaatgtcagtacccttccgcagagcatctcaagtgctccaactgaggtttttgagaccgaagagaaaaaagaagtcgaagaaaatgaaaagccagcaccaaaagctattgagcctgcaataaaaatcagccacacatcccccgacatcccagcagaagtgcaaactgctttaaaggagcatttaattaaacatgcccgtgtgcagaggcaaacgaccgatcctacatcttcatcccgccacaattccttcaggaggcacctaccaaggcaaatgaacgtctccagtgttgactttagcatgggcacggaacctgtcttacaaagaggagaaaccagaaccagcatcgggaggataaaaccggaactctataagcagaaatcagttgactccgagggcaacagaaaagacgacgtcaaaacctgtgggaaacttaactttgcgctccagtacgattatgaaaatgaactcctagttgttaaaattatcaaagctctagatctcccagctaaagatttcacaggaacttctgatccttatgtgaagatctatcttcttccggacaggaagaagaaatttcagacccgtgtgcaccggaagactttaaaccctctgttcgatgagctatttcagttcccggtggtttacgatcagctaagcaaccgcaaattacactttagtatatatgattttgacagattttccagacacgacatgattggggaagtgattcttgataatttatttgaagtctctgatctctccagggaagccacagtatggaaagatatccactgtgcaaccacagaaagcatagacctgggcgaaatcatgttttccctttgctatttgccaactgctggtcgcatgaccttgactgtgatcaagtgcagaaatctgaaggcaatggacattaccggatcatcagatccttatgtcaaagtgtctctgatgtgtgagggccgaagacttaaaaaaagaaaaacaactacaaagaaaaatactctcaatcccgtgtacaatgaagccattattttcgatatccctccagaaaatgtggaccaggtcagcctgtgcattgcggtcatggattatgacagggtgggacacaatgaggtcataggtgtgtgtcgaactggacttgacgctgagggtcttggaagagaccattggaatgaaatgctggcctatcaccgaaagccaatcacacactggcaccccttgctggagttacctggccgagcaaccagttttgacagtcaaggatcctgttcttctcccaggccaccgtccacaccataa

SEQ ID NO: 1127 - DNA, 2697 bp, Rattus norvegicus
atggccgtccggcccggcctgtggccagtgctcctgggcatagtcctcgccgcctggcttcgtggttcgggtgcccagcagagtgccacggtggccaatccagtgcccggtgccaaccccgacctgctgccccacttcctggtagagcctgaggacgtgtacattgtcaagaacaagccggtgttgttggtgtgcaaggctgtgcctgccacccagatcttcttcaagtgcaatggggaatgggtccgccaggtcgatcacgtaattgaacgcagcaccgacagcagcagcggattgccaaccatggaggtccgtatcaacgtatcgaggcagcaggtagagaaagtgtttgggctggaggaatactggtgccagtgtgtggcatggagctcctcgggtaccaccaaaagtcagaaggcctacatccggattgcctatttgcgcaagaactttgagcaggagccactggccaaggaagtgtcactggagcaaggcattgtactaccttgtcgccccccagaaggaatccccccagctgaggtggagtggcttcgaaatgaggacctcgtggacccctccctcgatcccaatgtgtacatcacgcgggagcacagcctagtcgtgcgtcaggcccgcctggccgacacggccaactacacctgtgtggccaagaacatcgtagcccgtcgccgaagcacctctgcagcggtcattgtttatgtgaacggtgggtggtcgacgtggactgagtggtccgtctgcagcgccagctgtgggcgtggctggcagaaacggagccggagctgcaccaacccggcacctctcaacgggggcgccttctgtgaggggcagaatgtccagaaaacagcctgcgccactctgtgcccagtggatgggagctggagttcgtggagtaagtggtcagcctgtgggcttgactgcacccactggcggagccgcgagtgctctgacccagcaccccgcaatggaggtgaggagtgtcggggtgctgacctggacacccgcaactgtaccagtgacctctgcctgcacaccgcttcttgccccgaggacgtggctctctacatcggccttgtcgctgtggctgtgtgcctcttcttgctgttgctggcccttggactcatttactgtcgcaagaaggaagggctggactccgatgtggccgactcgtccatcctcacctcgggcttccagcctgtcagcatcaagcccagcaaagcagacaacccccacctgctcaccatccagccagacctcagcaccaccactaccacctaccagggcagtctatgttcgaggcaggatggacccagccccaagttccagctctctaatggtcacctgctcagcccactggggagtggccgccatacgttgcaccacagctcacccacctctgaggctgaggacttcgtctcccgcctctccacccaaaactactttcgttccctgccccgcggcaccagcaacatggcctacgggaccttcaacttcctcgggggccggctgatgatccctaatacggggatcagcctcctcatacccccggatgccatcccccgaggaaagatctacgagatctacctcacactgcacaagccagaagacgtgaggttgcccctagctggctgtcagaccctgctgagtccagtcgttagctgtgggcccccaggagtcctgctcacccggccagtcatccttgcaatggaccactgtggagagcccagccctgacagctggagtctgcgcctcaaaaagcagtcctgcgagggcagttgggaggatgtgctgcaccttggtgaggagtcaccttcccacctctactactgccagctggaggccggggcctgctatgtcttcacggagcagctgggccgctttgccctggtaggagaggccctcagcgtggctgccaccaagcgcctcaggctccttctgtttgctcccgtggcctgtacgtcccttgagtacaacatccgagtgtactgcctacacgacacccacgacgctctcaaggaggtggtgcagctggagaagcagctaggtggacagctgatccaggagcctcgcgtcctgcacttcaaagacagttaccacaacctacgtctctccatccacgacgtgcccagctccctgtggaagagcaagctacttgtcagctaccaggagatccctttttaccacatctggaacggcacccagcagtatctgcactgcaccttcaccctggagcgcatcaacgccagcaccagcgacctggcctgcaaggtgtgggtgtggcaggtggagggagatgggcagagcttcaacatcaacttcaacatcactaaggacacaaggtttgctgaattgttggctctggagagtgaagggggggtcccagccctggtgggccccagtgccttcaagatccccttcctcattcggcaaaagatcatcgccagtctggacccaccctgcagccggggcgccgactggagaactctagcccagaaacttcacctggacagccatcttagcttctttgcctccaagcccagccctacagccatgatcctcaacctatgggaggcacggcacttccccaacggcaacctcggccagctggcagcagctgtggccggactgggccaaccagatgctggcctcttcacggtgtcggaggccgagtgttga

SEQ ID NO: 1128 - DNA, 2838 bp, Rattus norvegicus
  misc_feature (1)..(2838): n = a or c or g or t
atgagggcccggagcggggcgcggggcgcgctgctgctggcgctgctgctctgctgggatccgacaccgagcttagcaggcattgactctggtggccaggcactcccagactccttcccatcagcacccgcggagcagctgcctcacttcctgctggaaccagaggatgcctacatcgtaaagaacaagccagtggaattgcactgccgagccttccctgccacacagatctacttcaagtgtaatggcgagtgggttagccagaaaggccacgtcacgcaggagagcctggatgaggccacaggcttgcgaatacgagaggtgcagatagaggtgtcgcggcagcaggtggaggaactttttgggctcgaggactactggtgtcagtgcgtggcctggagctcttcgggaaccaccaagagtcgccgagcctacatccgcattgcctacttgcgcaagaactttgaccaggagcctctggcgaaggaggtacccttggatcatgaggtccttctgcagtgccgcccaccagagggagtgcctgtggctgaggtggaatggctcaagaatgaagatgtcatcgatcccgctcaggacactaacttcctgctcaccattgaccacaacctcatcatccgccaggcgcgcctctcagacacagccaactacacctgtgtggcaaagaatattgtggccaagcgccggagcacgacggccacagtcatcgtctatgtgaacggaggttggtccagctgggcagaatggtcaccctgctctaaccgctgcggccgaggttggcagaaacgtactaggacctgcaccaacccagccccactcaatggaggtgccttctgcgagggacaggcttgccagaagacggcttgcaccaccgtgtgcccagtggatggagcgtggactgagtggagcaagtggtccgcctgcagcacagagtgtgcgcactggcgcagccgcgagtgcatggcaccgccgccccagaacggaggccgtgactgcagcgggacgctacttgactccaagaactgcaccgatgggctgtgcgtgctgaatcagagaactctaaacgaccctaaaagccgccccctggagccgtcgggagacgtggcgctgtatgcgggcctcgtggtggccgtctttgtggttctggcagttctcatggctgtaggagtgatcgtgtaccggagaaactgccgggacttcgacacggacatcactgactcctctgctgccctcactggtggtttccaccccgtcaacttcaagactgcaaggcccagcaacccacagctcctgcacccatccgcccctccggacctaacggccagtgctggcatctaccgcggacctgtgtatgccctgcaggactctgccgacaagatccctatgactaattcaccccttctggatcccttgcccagcctcaagatcaaggtctatgactccagcaccatcggctctggggctggcctggctgatggagccgacctgctgggtgtcttaccacccggtacatacccaggcgatttctcccgggacacccacttcctgcacctgcgcagcgccagccttggttcccagcacctcctgggcctccctcgagaccccagcagcagtgtcagtggcacctttggttgcctgggtgggaggctgaccattcccggcacaggggtcagcctgttggtaccaaatggagccattccccagggcaagttctatgacttgtatctacgtatcaacaagactgaaagcaccctcccactttcggaaggttcccagacagtattgagcccctcggtgacctgcgggcccacgggcctcctcctgtgccgccctgttgtcctcactgtgccccactgtgctgaagtcattgccggagactggatcttccagctcaagacccaggcccatcagggccactgggaggaggtggtgactttggatgaggagactctgaacaccccctgctactgccagctagaggctaaatcctgccacatcctgttggaccagctgggtacctacgtgttcacgggcgagtcctactcccgctccgcagtcaagcggctccagctagccatcttcgccccagccctctgcacctccctggagtatagtctcagggtctactgtctggaggacactcctgcagcactgaaggaggtcctagagctggagaggactctgggtggctacttggtggaggagcccaagactttgctctttaaggacagttaccacaacctacgnctctccctccatgacatcccccatgcccactggaggagcaaactactggccaagtaccaggagattcccttctaccatgtgtggaacggcagccagaaagccctgcactgcactttcaccctggagagacatagcctagcctccactgagttcacctgtaaggtctgcgtgcggcaggtagaaggggaaggccagattttccagctgcacaccacgctggctgagacgcctgctggctccctggatgcactctgctctgcccctggcaatgctgccaccacacagctgggaccctatgccttcaagataccactgtccatccgccagaagatctgcaacagcctggacgcccccaactcacggggcaatgactggcggctgttggcacagaagctctccatggaccggtacctgaactacttcgccaccaaagctagtcccacaggcgtgatcttagacctctgggaagctcggcagcaggatgatggggacctcaacagcctggccagtgccttggaggagatgggcaagagtgagatgctggtagccatgaccactgatggcgattgctga

SEQ ID NO: 1129 - DNA, 2286 bp, Rattus norvegicus
ttgcatctggacccaggcgctagaatgtccttccctaaggcgcccctgaaaagattcaatgacccttcgggttgtgctccatctccaggtgcttacgatgttaaaacttcagaatcaactaaaggaccagtgtcttttcagaaatcacaaagatttaaaaaccaaagagagtctcaacaaaatcttaacattgacaaagatacgaccttgcttgcttctgctaaaaaagcaaagacgttggtgtcaaagaaggagtctcagaagaatgataaagatgtgaagagattagaaaaagagattcatgttcttttgcaagaacgagggactcaggacaaacggatccaggacatggagtctgagttggagaatacagaagccaatctaaatgcaccagtcacagagaaaccatctctgtctgccaataatgcttcactggaaaaacggcttactgagctgaccagagccaacgagctcctaaagtctaagttttctgaagatgctcaccaaaagaatatgagaactctaagcctggaattgatgaaactgagaaataagagagagacaaagatgaggagcatgatggctaaacaggaaggcatggagctgaagctgcaggccactcagaaggacctcattgagtctaaggggaaaatagtacagctggagggaaaacttgtttcaatagagaaagaaaagatcgatgaaaaatctgaaacagaaaaactcttagaatacatagaagaaattagctgtgcatctgatcaagtggaaaaatacaaactagatattgcccagttagaagaagatttgaaagagaaggatcgtgagattttatgccttaagcaatctcttgaggaaaaggtttccttttctaagcaaatagaagacctgactgttaaatgtcagctgcttgaagcagaaagagatgatctcgtcagcaaggacagagaaagggctgaaagcctcagtgctgagatgcaggttctaacagagaagctgcttctagaaaggcaagaatatgaaaagctgcaacaaaatgaattgcaaagccagtcacttctgcagcaagaaaaggaactgtctgctcatcttcagcagcagctctgctcatttcaagaggaaatgacctccgagaggaatgtctttaaagaacagttgaagcttgccctggatgagctggatgccgtccagcagaaaaaggagcagagtgaaaagctggttaaacagctagaagaggaaacgaagtcaactgcggaacagctgaggcggctggatgatctgctgagagagaaagaaattgaactggagaaaagaaccgctgcacatgcccaggccactgtgattgcgcaagagaagtacagtgacacagcgcagactctgagagatgttactgctcagttagaaagctataagtcatcaacacttaaagaaatagaagatcttaaactggagaatttgactctacaagaaaaagtagccatggctgagaaaagggtagaagatgttcaacaacaaatattaacagctgagagcacaaatcaggaatatgcaaaggtggttcaagatttgcagaacagctcaacattgaaagaagcagaaattaaagaaatcacatcttcatatcttgagaaaataactgatttgcaaaatcaactccgacaacaaaatgaagactttaggaagcagctggaagaggaaggggcaaaaatgacagagaaagaaactgcagtgacagaattaaccatggaaattaataaatggcgtctcctatatgaagaactgtttgacaaaactaaaccttttcagcaacaactggatgccttcgaagcagagaagcaggcactgttgaatgaacatggtgcaactcaggagcagctaagtaaaatcagagactcctacgcacagctgcttggccaccagaatctgaagcaaaaaatcaaacatgtcgtgaaattgaaagatgaaaatagccagctcaaatcggaggtgtcaaaactccgatctcagcttgctaaaaggaaacaaaatgagctcagacttcagggagaattagataaagctctgggcatcaggcactttgacccttctaaggctttttgccatgaatctaaggagaatgtgaccctcaagactccattgaaagaaggcaacccgaactgctgctgagtcagactgcagggaccgtggaagtggacgtccaagatacttgctgaagattgttctcttcattattcttgatattatgtttatagtatatattatataatgtatttaatttctactgcc

SEQ ID NO: 1130 - DNA, 3310 bp, Rattus norvegicus
caggaaacccggagcagccgggtgcagcggggccgcgatgcagcagcagcagcagcaggagtcgccccagggcagcagcggcagcagcagcagaagcagtagcgggcggcgctgagctgccaccaccgccgctgaggaagaagccggccaagcagcagccgcgtcccgacgcccgcgcccccgatccccgcgccgcgacctccgcgccccgaaccctacgcccggttccgccaactttcactctgctttggcgactcagctcggcttggcgccaatggtggaggccatagtggagtttgattaccaggcccagcatgatgatgagctgacgatcagcgtgggtgaggtcatcaccaacatcaggaaggaggatggaggctggtgggagggacagatcaacggcaggagaggtttgttccctgacaactttgtaagagaaataaagaaggatgtgaagaaagaccttctctctaacaaagctcctgagaagcccatgcatgatgtgtccagtggaaactctttgctttcttctgaaaccattttaagaaccaataaacgaggagagcgacggagacgccgatgccaggtggcgttcagctacctgcctcagaatgacgatgagcttgagctgaaagtcggggacatcatagaggttgtaggagaggtggaggaaggatggtgggaaggcgtactcaatgggaagactggaatgtttccttccaacttcatcaaggagctgtcaggggagtcggatgagcttggcatttcccaggatgagcagctttccaagtcaagcttaagagaaaccacaggctccgagagtgatggaggcgactcaagcagtaccaagtctgaaggcgccaatgggacggtggcaactgcagctatccagcccaagaaagttaaaggagtggggtttggagatattttcaaagacaagccaattaaactaagaccaaggtcgattgaagtggaaaatgacttcctgcctgtagaaaagacaattgggaagaagttacctccagctacatcaaccccagacccatcgaaaacagaaatggacagcaggacaaagaccaaggattactgcaaagtaatatttccatatgaggcacagaatgatgacgaattgacaatcaaggaaggagatatagtgactctcatcaataaggactgcatcgatgtaggctggtgggaaggagagctcaatggcagacgaggagtgtttcctgacaacttcgtgaagttacttccgtcagacttcgacaaggaagggaatagacccaagaagccgccacctccatccgctcctgtcatcaaacaaggggcaggtaccacagagagaaaacatgaaattaaaaagatacctcctgaaagaccggaaacacttccaaacagaacagaagagaaagaaagaccagagagagagccaaaactggatttacagaagccttctgttcctgccatcccacctaaaaagcctcgtccacctaagaccaattctctgaacagacccggtgtgttgcccccaagaagacccgagcgaccagtgggcccactgacacacaccaggggtgacagttcaaagattgacttggcaggcagcacgctctctggcatcttggataaggacctctcagaccgcagcaatgatattgacctagaaggttttgactccgtgatatcatctactgaaaaactcagccacccaaccacaagcagaccaaaagctacgggaagacggcctccttctcagtcgctcacatcttcttccctttcaagccctgatatctttgactccccaagtcccgaagaagataaagaggaacacatttcgcttgcgcacagaggaatagacgtgtcaaagaagacttccagaactgttaccatatcccaagtgtctgataacaaggcttccctgccacccaagccagggaccatggcagctgccagcagtgggccagcctctctctcttcagtggcttcctctcccatgtcatcctctttgggaacagctggacaacgagccagttctccatctctgttcagcgcagaaggaaaagcaaagacggagtctgcagtgagcagccaggctgccatcgaggagctcaagatgcaagtccgtgagctgagaaccatcatcgagaccatgaaggaccagcagaaacgtgagattaagcagttactgtcagaattggatgaagagaaaaagatccggctccgattgcagatggaggtgaatgacataaagaaagctctccaatcaaaatgaatacttgatcattgaaacgccacattattcaccccgagtgcaagactcagatattctgccccaatcaaaatcatcttgtgccaaaaaaaaaaaaaaattaaaggtttgattcatcgtgtccctgtttgaacattcagcacaaaagtcttcttagcacaacacaattctacccaagagaagactctttcccatggtgttgtcctgggtccggcagtggttgtgatttagagccaaacgtgctaaaggcttttctaccttgagatctccggcaaaatgaaaactcaggcagtttagtccatagtagtactattttgatgatattttccattaacaaaatgtaatttcggattattcgtttataggctttataatgttatggttttttttttttaaatcgtgttttgtcacagatgcccctagtgtttgtgctaacgtagtcagaagcaagtgcctcactcacttgctgcagatggagcaaatgctgcctggctttgtattccccatttaggagtctatcacatatgcaatttgaggtccaatccttccctttccctgccagctgacccccaccactctaagagaaattttagcttatatatgatggtatatttacaaaaagagaaagaaaaaatctggtatttgcaatgatctgtgccttctttctaccacccttttgattggagcttttgtgatgcagctaccaagattccaaataaagaaataaaaatcagccacttttatccctgtccactagaggccactgtcttcacagcttctctcaccctagccaaaggtcctaagaggaatccgctgagaagtctggcctgctctttggtaccagctgtgacttttccgtttctcctgctttgaggttgttcacgagactagaaatgtcattccagcttgattgttttatcatcagccaagttaaacccctgcttcctgccttttacacctattgcgtgaacagaatatgcattattaaagcaaaaataaataaaaataaaatgcaagtgaaaaaaaaaaaaaaaaaaaaaa

SEQ ID NO: 1131 - DNA, 4413 bp, Rattus norvegicus
  misc_feature (1)..(4404): n = a or c or g or t
ggcgtcttgttcctgtttcgccacagttcctaccttatgagcttggattcctcacgctaataaaagaggagcagtaaaagctggcaggctgacagaggcaacctcaggacggactttctggctactgaccattttgctgtgtcttactaggattgtgtgtggacgtgagatcaaccatgagctccgttgcagttttgacccaagagagttttgctgaacatcgaagtgggctggttccacaacaaatcatagttgccacattaaattcagaagaagaaagtgaccctccaacctacaaggatgccttccctccactgcctgagaaagcagcttgcttggaaagtgcccaagaacctgctggagcctggagtaacaagatccggcccatcaaggcctctgtcatcactcaggtgtttcatgtacccctggaggagagaaaatataaggacatgaaccagtttggagaaggtgaacaagcaaaaatctgccttgagatcatgcaaaggactggtgctcacctggagctctctctggctaaagaccaaggtctctccatcatggtctcagggaagctggatgcagtcatgaaagcccggaaagacattgttgctagactacagacacaggcctcagccactgttcccattcctaaagagcaccaccgctttgttattggcaaaaacggagaaaaactacaagacttagaactgaaaactgctaccaaaatccagatcccacgcccagatgaccccagtaatcagatcaagatcactggcaccaaagaaggnatcgagaaagctcgccatgaggtccttctgatctctgctgagcaggacaagcgtgccgtaaagaggctagaagtggagaaggccttccaccccttcatcgctgggccgtacaatagacttgtgggtgaaatcatgcaggaaacagggacgcgaatcaacatccctccacccagtgttaaccgtacagaaatcgtcttcactggagaaaaggaacagctggctcaggctgtggctcgtattaagaagatttatgaggaaaagaagaagaagactacgaccattgcggtagaggtgaagaaatctcaacacaagtatgtcatcgggccgaagggcaactcactgcaagagatcctggaacgtactggagtctccgttgagatcccgccctcagacagcatctccgagactgtgatacttagaggcgagcctgaaaagctgggacaggcattgactgaagtctatgccaaggccaacagttttacagtgtcctcagtctctgccccttcctggcttcaccgtttcatcattggtaagaaagggcagaacctggccaaaatcactcaccaaatgccaaaggttcacattgagttcacagaaggtgaggacaagatcaccctggagggccccacagaagatgtgaatgttgcccaggaacagattgaaggaatggtcaaagacctgattaatcggatggactatgtagaaatcaacattgaccataaattccacagacacctcattgggaagagtggagccaacatcaacagaatcaaagaccagtacaaagtgtctgtgcgcatcccccctgacagcgagaagagtaacctgatccgaattgagggagacccacaaggtgtgcaacaggccaagcgggagctgctggagcttgcttctcgcatggaaaatgagcgcaccaaggatctaatcattgagcaaagatttcatcgcacaatcattgggcagaaaggtgaacggattcgagaaattcgtgacaaattcccagaggtgatcatcaactttccggatccagcacaaaagagtgagattgttcaactcagaggccccaagaatgaggtggagaaatgtaccaagtacatgcagaaaatggttgcagatctggtggaaaatagctattcaatttctgtaccgatcttcaaacagtttcacaagaatatcattgggaaaggaggtgcaaacattaaaaagattcgtgaagagagcaacaccaagattgaccttcctgccgagaacagcaactcggagaccattgtcatcactggcaagcgagccaactgtgaagccgcccggagccggatcctgtccatccagaaagatctggccaacatagctgaggtggaggtctcaatccctgccaaactacacaactctctcattggcaccaagggtcgtctgatccgctccatcatggaggaatgtggtggcgtccatattcactttcctgtggaaggttctggtagtgacactgttgtcatcaggggtccttcctcagatgtggagaaggccaagaagcagcttctgcacctggctgaggagaagcaaaccaagagttttactgtggatatccgggccaagccagaataccacaaattcctcattggcaaagggggaggtaaaatccgcaaggtgcgcgacagtactggagcccgcattatatttccggctgctgaggataaggaccaggacctgataacaatcataggaaaggaagatgctgtccgtgaggcacaaaaggagctggaagcattgatccagaacctggataatgtggttgaagactacatgctggtggaccccagacaccaccgccattttgttatccgaagaggacaggtattacgagagattgctgaagaatatggcggggtgatggtcagcttcccacgctctggcacacagagtgacaaagtcactctcaagggtgccaaagactgtgtggaggcagccaagaagcgaattcaggaaatcattgaggatctggaagctcaagtaacgctggaatgtgctataccccagaagtttcatcgttcggtcatgggtcccaaaggttcaagaatccagcagatcactcgggactacaatgttcaaattaagttcccagacagagaggaaaacccagttcacagtgtagagccttccatccaggagaatggagatgaggctggagagggcagagaggccaaggagaccgacccgggatctcccaggaggtgtgacatcatagttatctctggccggaaagagaaatgtgaggctgccaaggaagccctggaggcactggttccagtcaccatcgaggtagaggtaccctttgatcttcaccgctacatcattgggcagaaaggaagtggaatccgcaagatgatggatgagtttgaggtgaatatacatgtgccagcccccgaactgcagtcacacaccattgccatcactggccttgcagcaaatttggacagggctaaggcggggctactggatcgagtaaaggagctgcaggctgagcaggaagatcgggctttaaggagttttaagctgagtgtcactgtagaccccaaataccatcccaaaattatcgggggaaaaggggcagtgatcacacagatccgattggaacatgatgtgaacatccaatttcctgataaggacgatgggaatcagccccaggaccaaatcaccatcacagggtatgagaagaacactgaagctgcccgtgatgctatcctgaaaattgtgggtgagcttgagcagatggtttctgaggatgttcccttggatcaccgtgtgcatgcccgaatcattggtgccagaggcaaagccatccggaaaatcatggatgagttcaaggtggacattcgcttcccacagagcggagctccagaccctaactgcgtcactgtgacaggactcccggagaatgtggaggaagctatcgaccatatcctcaacctagaagaggaatatctggctgatgtggtggacagtgaggcgctgcaagtttacatgaagcccccagcacatgaagagtccaaggcaccatccaaaggctttgtggtgcgagatgctccctggacctccaacagcagtgagaaggctcctgatatgagcagctctgaagaaattcccacctttggggctcaagtggcccccaagaccctcccgtggggccccaaacgataatgatcaaaaagaaactttccagcctgctgcccaaacccaaccacacaatggtttgtctcaatctgactcagcagctggaccctcgtaaattgttgatgctccccctccccgaagtctcgcagcaaagcctggtgggctggccttctgtggctgcttcccctggcctggtcagcacccgcaggctcagggtctgctcctgacgctgtgctctgggaaagtgcacgccactgcgtgaaacactaagcaaggtaatcgagcatttcgtgatcacagactccagcttcctggtccacccagcatgtagtcagcattctgactttcacagcagagttccacagcggctaggagttgacttccttgtgtcatgacctcaggaaataaatttccttgactttataaaagccaaaaaaaaaaaaaaaaaaaaaaaaaa

SEQ ID NO: 1132 - DNA, 1759 bp, Rattus norvegicus
ctacttacgcggctctgctgatcgtggggcaagcgcggccatggctcagcaagggaagatactcaaggagcaaaagtacgaccggcagctgaggttgtggggtgatcatggtcaagaagctttggaatctgctcacgtttgcttgataaatgccacagctacaggaacggaaattcttaaaaacttggtactgccaggtataggatcatttacaattatcgatggaaatcaggtcagcggagaagatgttggaaacaattttttccttcaaaaatgcagtattggcaagaatcgagctcaagctgccatggaattcttacaagagctaaatagcgatgtctctggaagttttgtggaagagagtccagaaaaccttctagacaatgatccttcatttttctgtaggtttactattgtggttgcaactcagcttcttgaaagtacattactacgtttagcagatgtcctctggaattcccagatccctcttttgatctgtaggacatatggcctagttggttatatgaggattattataaaagaacatccagtaatagaatctcatccagataatgcattggaggacctacgactagataagccatttcctgaactgagagaacattttcagtcttatgacttggaccatatggaaaaaaaggaccatagccatactccatggattgtgatcatagctaaatatttagcccagtggtatagtgagacaaatggacgaattcctaaaagttataaagaaaaagaggacttcagagaattgataagacaagggattttaaagaatgagaatggagctccagaagatgaagagaattttgaagaagctattaaaaatgtgaacacagcactaaatacaactcagatcccaagcagtattgaagatatatttaatgatgatcgctgcataaatatcaccaaacagaccccatctttttggattttagctcgtgccttaaaggaatttgtggccaaggagggtcaaggaaatttacctgttcgaggcacaattcctgatatgattgcagattcaaacaaatacataaaattgcagaatgtttatcgtgagaaagcaaagaaagatgctgctgctgtaggtaatcatgttgccaaattgcttcagtcttgtggccaggcaccagagtccatttcagagaaagaattaaaactgctttgtagcaattctgcatttcttcgagtggtaagatgtcggtctttagctgaagagtatggtttgcatacagtcaacaaagatgaaattatttctagcatggacaatccggataatgagatagtcctgtacctaatgttgcgggctgttgatcgatttcataagcagcatggcagatacccaggagtatctaactatcaagttgaagaagatatagggaagttgaagtcctgtcttactggcttccttcaggaatatgggttgtctgtaatggtgaaggacgattatgtccatgaattttgccggtacggagctgctgagccacacaccgttgctgcattcctgggaggagctgctgctcaagaagttatcaaaataatcaccaaacaatttgtaatttttaacaatacttatatttatagtggtatgtcacaaacttctgcaactttccaattgtagaataagcaccccgtgtaatatgttaatggttgaaactgtaattgtcttcctgttgtgctttactttgtaaacatctgtttagggacagaagttaagttgtttccttaataaaat

SEQ ID NO: 1133 - DNA, 1854 bp, Rattus norvegicus
ggagacataaattgccgactgtgctgagaagttgccagttgccaagtttgctgtgcttgctccctccgctcgccttgaaagcccgggcactctctgtcgctgggactcttgctcaccgcttgccagcctcctcagagctcttctcggctgggcctgtggcttcgaagtttttttgttttttcatcttttcacaacccacaaaaaccactagctgctgaggctccaacgagatcaagatgtggaccgcgccagtgttgctctgggttttggggagcgtttggttctgggactcagcgcagggaggggccatcggtgcgctagaagatgatcttgtgaccccgggtccaggagatgacatggtgaacccaggtctagaagacagaatagaaaccacggacactacaggagaactggataagtcaactgccaaggcgcctctggtaccaacacagcctcccattgaggaactgccgacctcaggaacctccgaccacgatcacaaagaacatgagagtacgaccactgtcaaagcggtgaccagccactccacggacaagaaaacaactcaccccaatagagataacgcaggcggtgaaacgcagaccacagataagaaagatggcttggctgtagtgaccctggtcggaatcataattggcgtcttgttagccattggcttcattggagggatcatcattgtggttatgaggaagatttctggaaggttctcgccctaaagagccaaacagaactggttgttctcccaacacatctgaaaataagagagcttccaccttgccctgttccccatccctcttcctgtggaggaagatgacccatggaatgcccacccacccctctcacagccatggtgacccctccacttgccagcagtaccaaaggaaagatacgggacaagccactggcccctcgaaccatctgcgtttggaaatcaaattttttaatataaatgttatgattgaggaccacatgcatagaaaaatggtgcaaaaaccgagacagtatcatcagctttatcaactgtaaccatgggttggttcttccgggccagtcccagtctgttaagaggcaaaagaatttggaaaatgttacctcacagaggcacgggtctttttgcagttgccaacctgcaaatgcagttgatgcatacatattccagcctagtggggtctgaatcagtgcattgaaagtataaacccaaaatcaggcgtgataggcagcccctcagggagcttcattataccttttcagaagcatccactgccttcagttcccggaagataccttgctttttacaagcctccaaaccctctctaagcctcagatgactcaatgacccagaggtctgtctactccactccccctggtgatggaaagcccaagttgaggaaccatgtcctcacctccctaggcctcaagccttcagatcaaccgcttctttctggacgatggagacctcatcccagatgctcagaaagtttgttggatgtcacaaaatgccagagcctcagccgctgtcgaaccaagaacgaaactcagtccttaagtggaagtgactcctgtgcctgctttaggctaggaaatgagaccaaccagtttctagcacctgccttctgcttcccaggaaagacggagaaaaaaataatcttgtatgttcttaactgcttctaggtggtggatggaaaggtttgatgttaatttccggtcttcgtgacataccacatcttcccatgaggactcggtgttgctggcacaagagctgtagtgtcttggttacctgtgttggtactcaatacagtgtagacatcttttcaaataaaatatgattgtgtg

SEQ ID NO: 1134 - DNA, 4665 bp, Rattus norvegicus
attgcttgcttcctaggggccagggctgttctgagcacgtcacaccaatccaagcttcacaaacacctatgggcagttgaagagggggaggcctcggacttctcgctggcctgggattcctctgtggcagcagcgggaggcctagaaggagagtcagagtgtgatcggaaatccagccgtgcgctggaagacaggaacagcgtgacaagtcaagaggagagaaacgaggacgatgaagatgtggaagatgagtcaatttacacctgcgatcactgtcagcaggacttcgagtctctggcagacctgacggaccaccgggcccaccgctgtcctggagatggtgatgacgacccacagctctcctgggtggcttcatctccctccagcaaggatgttgcgtcacccacgcagatgatcggcgatggttgtgaccttggcctcggcgaggaggaaggcggcaccggcctgccgtacccttgccagttctgcgacaagtccttcatccgcctgagctacttgaagaggcatgaacagatccacagcgacaagctgccgttcaagtgcaccttctgcagccgcctcttcaaacacaagaggagccgggaccggcacatcaagctgcacacaggcgacaagaagtaccactgccacgagtgcgaggcggctttctcccgcagggaccacctcaagatccacctgaagacccacagctccagcaagccgttcaagtgcagcgtgtgcaaacgcgggttctcctccaccagctccctgcagagccacatgcaggcccacaagaagaataaggaacacctggctaagtcagagaaggaagccaagaaggacgacttcatgtgtgactactgcgaggacacctttagccagacagaagagctggagaagcatgtgcttaccctccacccgcagctctcagagaaggcggacctccagtgtatccactgccccgaggtctttgtcgacgagagcacgctgctggcccacatccaccaagctcacgccaaccagaaacacaagtgccccatgtgccctgagcagttctcctccgtggagggtgtgtactgccacctggacagccaccggcagcctgattccagcaatcacagtgtcagccccgaccccgtgctgggcagtgtggcttccatgagcagtgctacacctgactcgacgcccgaccccgtgctgggcagtgtggcttccatgagcagtgctacacctgactcgagcgcctctgtggagcgcgggtccacgccagactccaccttgaagccgctgagggggcagaagaagatgcgggatgacgggcagagctggtccaaggttgtctacagctgcccctactgttctaagcgggactttaccagcctggctgtgctagagattcatctgaagaccattcacgcggacaaacctcagcagagtcacacgtgtcagatttgcctggactccatgcccacgctctacaacctcaacgagcatgtgcgcaagctgcacaagagccacgcttaccccgtcatgcaattcggcaacatctccgccttccactgcaactactgccccgagatgttcgcggacatcaacagcctgcaggagcacatccgagtctcgcactgtggccccaatgccaacccccccgacgggaacaatgctttcttctgtaaccagtgttctatgggctttctcactgaatcctccctcacagagcacatccaacaggcacactgcagtgtggggagcaccaagctggagtctcccgttatccagcccacacagtccttcatggaggtctactcctgcccttactgtaccaactcccctatctttggctccatcctgaagctcactaagcacatcaaagagaaccacaagaacatcccgttggcacacagcaagaagtccaaggcggagcagagtccggtctcctctgacgtcgaggtgtcttccccgaaacgacagcgcctctcggggagtgccaactccatctctaacggcgagtacccctgcaatcagtgcgacctcaagttctccaacttcgagagcttccagacccacttgaagctgcacctggagctgctgctccggaagcaggcctgcccccagtgcaaagaggacttcgactctcaggagtccctcctgcagcatctgaccgtgcactacatgaccacgtccacccactacgtctgcgagagctgtgacaagcagttctcctcagtggacgacctgcagaagcacctgctggacatgcacacctttgtgctataccactgcaccctgtgtcaggaggtcttcgactctaaggtgtccatccaggtgcacctggccgtgaagcacagcaacgagaagaagatgtaccgttgcaccgcctgcaactgggacttccgcaaggaggctgacctgcaggtgcacgtcaagcacagtcacctcggcaacccggccaaggcccacaagtgcatcttctgtggtgagaccttcagcaccgaggtggagctccagtgccacatcaccacgcacagcaagaagtacaattgcaggttctgcagcaaagccttccacgccgtcctcctgctggagaagcaccttcgggagaagcattgtgtgtttgacccagctgcagagaatggcacggccaacggggtgccccccacctccaccaagaaggcagagcccgccgacctgcagggcatgctgctcaagaaccctgaggcaccgaacagccacgaggccagtgaggacgatgtggatgcatcagagcccatgtacggctgtgacatctgtggtgcagcctacaccatggaggtgctgctgcagaaccaccgactccgggatcataacatccggcccggagaggacgatggctcacgcaagaaggcagagttcataaagggcagccacaagtgtaacgtgtgctctcggactttcttctcggagaacgggctccgggaacacctgcagacgcaccggggccctgccaagcactacatgtgtcccatctgtggcgagcgcttcccctcgctgctgacgctcactgagcacaaggtgacccacagcaagagtctggacacaggcacctgtcgcatctgcaaaatgcccctgcagagtgaggaggagtttatcgagcactgccagatgcaccccgacttgcggaactccctcactggtttccgctgtgtggtctgtatgcagactgtcacctcaaccctggagctcaagatccatggcacctttcacatgcagaagctggctggcagctcagctgcttcctcccccaatggccaggggctgcagaagctctacaagtgcgccctgtgcctcaaagagttccgtagcaagcaggacctggtcaggcttgacgtcaatgggctgccctatggcctatgtgccggctgcatggcccgtagtgccaatggacaggtgggtggcctggccccacccgaacctgccgaccggccctgcgctggcctccgctgccctgaatgtaacgtgaagtttgagagtgctgaggacctggagagccacatgcaggtggaccaccgtgatcttaccccagagaccagtgggccccggaaaggtgcccagacgtcaccagtgccccggaagaagacgtaccagtgcatcaagtgccagatgaccttcgagaacgagagagagatccagatccacgtcgccaaccacatgatcgaggaaggcatcaaccatgagtgtaagctgtgcaaccagatgttcgactccccagccaagctcctttgtcacctcatcgaacacagcttcgagggcatgggtggtactttcaagtgccccgtgtgcttcacagtcttcgtccaggccaacaagctgcaacagcacatcttcgccgtgcacgggcaggaggacaaaatctacgactgctcgcagtgcccacagaagtttttcttccagacagagttgcagaaccacacgatgagccagcacgcacagtgagggacctcgcgacaggacacctctccgcagaaggcttgccggagacgccgtggggagggccatttgaacattacatccaatcaaagtgtcatttgcaacccagatgtaaaactctaatgatttggccatgaggcgctgctattataagcagctggaaatgaatattaatggcagagattaaaagtattccatgctcagtgttttttattgtcctgctacagctagtgtgcttttagagttttcgccgcagactacatttctagtgttagagaaacctgcttttttgaggctattgtcctttgttccttcatgtattatattgatagttttttttaaaggattagtgtgattttttttgcttcttttctatttctttctttcttgtttttctttctcccccttcagttaactactttttaattgaaattctaggtaattgtgcatcgtgatgtgattgcttggctattgtctgaatatttccttttaattttttaattaaagactaatgctttgattggatttgccagttcaccggacagtgattaaaactctgtaatgaaaataatcggtttccgtgcaactggatggtctgcttttaaatgtgacttgatctgactgcagtaactagttcagctcaataaagggaatccatgcgttcacccccaaaaaaaaaaaaaaaaaaaaaaaaaaaaa

SEQ ID NO: 1135 - DNA, 1705 bp, Rattus norvegicus
tctgtgtctgtgtgtgtttaaatgttcgtgtgtgtgagcatgtgcgtgtggatgtcagaggacaggctcatgtcagtttcttctgagctagtgctggcctgtgagcttctgatgcttccttctctgtctcttccttcaggattgtagctgtgccttctgcctctagctttgtgtgggtgccaaggatgtgtgcgcggcgagcgctttgcccgctgaaccatctcctcaggccctcactgcggcttttgtttcctgcagaactcgagacatgcccaccatcgcttctcccctgcctctcgccaccaccggtcctgagaacggcagctccatctacgactatgactacttggatgacgtgactgtcttggtttgcagcaaagatgaggtcctgtcctttggcagagtctttctgccggtggtctacagcctgatctttgtgctgggcctggccggcaacctccttctcctggtggtattgctccactctgtgcctcaacgacgacggatgattgagctgtacctgctgaacctggctgtctccaacctcttgtttgtagtgacgatgcccttctgggccatctctgtggcctggcattgggttttcggcagtttcctgtgcaaggtggtgagcactctctactctattaacttttactgtggcatcttcttcatcacctgcatgagtctggacaaatacctggagattgtccacgctcagcccctccacagacccaagacccggttcaggaacctgcttctcattgtcatggtgtggatcacagccctggctgtctctgtcccagaaatggtctttgtgaaggtccaccagaccttagatggtgtgtggcactgctatgccgattttggcggacatgcaaccatttggaagctgtacctgcgcttccagatgaacctcctggggtttctcttcccactgttggccatgattttcttttactcccgcatcggttgtgttctggtcaggctgaggccaccgggacagggccgggctctgaggacggctgcggccctggtggtagtcttcttcctgctgtggttcccgtacaacctcaccttgttcctgcactcgctgctggatctgcatgtctttgggaactgtgagatcagccaccgtctggactatatgttgcaggtgacagagagcctggccttctcccattgttgcttcaccccagtcctctatgccttctccagtcacagtttccgccagtaccttaaagcggttctgtccgtggtgctgagacggcaccaggcacctggcaccgcccacgcccctccatgtagccattcggagagcagcagggttactgcccaggaagatgtggtcagcatgaacgaccttggcgagaggcaggctgacatctcccttaacaagggggagataggaaataattaatccccgggtctgggaacggtggttctctctgagggacagcatggccgtgcttgctgcttgccccagtggtttccaaccaccagcagtctttgttcactactgcctctccctccttccacttcctgatcccatactcactgatgaaccactgcagctcttcactgatctccgcttccgtcctggcgcttctgtggcttttcctggcccccggcagccaatgaggacactccattcttggccataaaggccataaagatataaaaccttcaaaaaaaaaaaaaaaaaaaa

SEQ ID NO: 1136 - DNA, 5453 bp, Rattus norvegicus
gaattcggcacgagctgcgcggggacgggcgggggaccccgggccggggcgcagcgcacacgcgtggcgcacgccaagtggaccgggcggcgccgaaggcactcgggatcgcgctttcggagcttcgggccgcccagaccccgggcgcggacggcccgcggcgccccctgggctctcggtgccccgcgcagccccgggggcgatcggagcccgggtcggggagtgggagccacccgcgctcatccccttccccccacgggcgggcgggcagcccgggggagggcgggcggcggcgcttggctgtatatatctccgcacaccccgccaggtccgcacagcgccccgagcccaggcgcctccccgcccccctcccgggctccgcggcggcggcggcagcagtagcagcaacatggctgttgatgggtgttcggggtggcgctggcggcgggaggagctccctcgagcccctgcgccggccgtccgttgctagctatggcaaacggtggcggcggcggcggcggcggcagcagcggcagcagcggcggcggcggcggcggcggcggaggcgagacggctcttagaatgagcagcaatatccacgcgaaccatctcagcctagacgcgtcctcttcttcctcctcctcttcttcctcctcctcttcctcctcgtcctcggtccacgagcccaagatggatgcgctcatcatcccggtgaccatggaggtgccgtgcgacagccggggccaacgcatgtggtgggctttcttggcctcctccatggtgactttcttcgggggcctcttcatcatcttgctctggcggactctcaagtacctgtggaccgtttgctgccactgcgggggcaagacgaaggaggcccagaagataaacaatggctccagccaggcagatggtactctcaagccagtggatgaaaaagaggaggtggtggcagccgaggtcggctggatgacatctgtgaaggactgggcaggggtgatgatatctgcccagacactgactggcagagtcctggttgtgttagtctttgctctcagcattggtgcccttgtaatatacttcatagactcatcaaacccaatagaatcctgccagaatttctacaaagatttcacattacagatcgacatggctttcaacgtgttcttccttctctactttggcttgcggtttattgcagccaatgataagctgtggttctggctggaagtgaattctgtagtagatttcttcacagtccctcccgtgtttgtgtctgtatacttaaacagaagttggcttggcttgagatttttaagagctctcagactgattcagttttcagaaattttgcagtttctgaatatccttaaaacaagtaattccatcaagctggtgaacctgctctccatatttatcagcacgtggctgactgcagctggattcatccacttggtggagaattcaggggacccatgggaaaatttccaaaacaaccaggcacttacgtactgggaatgtgtctacttactcatggtcacaatgtctacagtgggttacggggatgtttatgcaaaaaccacgcttggacgcctcttcatggtcttcttcatcctcgggggactggccatgtttgccagctacgtccctgaaatcatagagttaataggaaaccgcaagaaatacgggggctcctatagcgcggttagtggaagaaagcacattgtagtctgtgggcacattactctggagagtgtctctaacttcctgaaggactttctgcacaaggaccgggatgatgtcaacgtggagattgtttttcttcacaacatctcccctaaccttgagcttgaggctctgttcaaacggcatttcactcaggtggagttttatcagggctctgtcctcaatccacacgatcttgccagagtcaagatagagtcagcagatgcatgtttgatccttgccaataagtactgcgctgacccggatgcagaagatgcctccaacatcatgagagtgatctccataaagaactaccacccaaagatcaggatcatcactcagatgctgcagtatcacaacaaggcccatctgctcaacatccccagctggaactggaaagagggtgatgacgcaatatgccttgcagagctcaagttgggtttcatagcccagagctgtctggctcaaggcctctccacaatgcttgccaatctcttctctatgaggtcattcataaagattgaggaagatacatggcagaaatactacttggaaggagtctccaatgaaatgtacacagaatatctttccagtgccttcgtgggtctgtccttccctactgtttgtgagctgtgttttgtgaagcttaagctcctgatgatagccattgagtacaagtctgccaacagggagagccgaagccgaaagcgaatattaattaaccctgggaaccaccttaagacccaagaaggtactttaggatttttcatcgcaagtgatgccaaagaagttaaaagggcatttttttactgcaaggcctgtcatgatgacgtcacagatcccaaaagaattaaaaaatgcggctgcaggcggctgatctattccaagatgtccatctacaagagaatgagccgagcatgttgttttgattgcggacgttctgagcgtgactgctcgtgcatgtcaggccgtgtgcgtggtaacgtggacacccttgagagaaacttcccgctttcttctgtctctgttaatgattgctccaccagtttccgtgcctttgaagatgagcaaccgccaacactgtcaccaaaaaaaaaacaacgtaatgggggcatgaggaactcacccaacacatccccgaagctgatgaggcatgaccccttgttaattcctggcaacgatcagattgacaacatggactccaatgtgaaaaagtacgactccactggaatgtttcactggtgcgcacccaaggagattgagaaagtcatcttgactcgaagtgaagctgccatgactgtcctgagtggtcatgttgtagtctgcatctttggggatgtcagctcagccctgattggcctccggaacctggtgatgccgcttcgtgctagcaattttcactatcatgagctcaaacacattgtgtttgtgggctccatcgagtacctcaagcgggagtgggaaacactgcacaacttccccaaagtatccatattgcctggtacgccattaagtcgggctgatttaagggctgtcaacatcaacctctgtgacatgtgcgttatcctgtcagccaatcagaataatattgatgatacttcgcttcaggacaaggaatgcatcttggcgtcactcaacatcaaatctatgcagtttgatgacagcatcggggtcttgcaggctaattcccaaggattcacacctcctggaatggacagatcatcacctgacaacagcccagtgcacgggatgttacgccagccgtccatcacaaccggagtcaacattcccatcatcacggaactcgtgaacgatactaatgttcagtttttggaccaagatgatgatgatgaccctgacacagagctgtacctcacacagccctttgcttgtgggacagcatttgccgttagcgtcctggactcactcatgagcgcgacatacttcaatgacaatatcctcaccctaatacggaccctggtgacaggaggagccacgccagagctcgaagctttaatagctgaggagaatgcacttcgagggggttacagcactccgcagacactagccaacagggaccgctgccgagtggcccagttagccctgttggatgggccctttgcggacttaggggatggtggttgttatggtgatctgttctgcaaagctctgaaaacatataacatgctttgttttggaatttaccggctgagagatgcccacctcagcacccccagccagtgtacaaaaaggtacgtcatcaccaatcccccctacgagtttgaacttgtaccgacagacctgatcttctgcctgatgcagtttgaccacaacgctggccaatcccgggccagtctgtctcattcctcccactcctcacagtcgtccagtaagaagagctcctctgtccactccatcccgtccacagcaaatcggccaaaccggcccaagtccagggagtcccgcgacaaacagaaaaaagaaatggtttacagatgagacggataatgcctatcccagaaacattcaaatccaagcccatgagtacccacatggctaaccagatcaaccaatataaatccacaagcagcctgatccctccaatcagagagttgaagatgaatcttcattcccaggagaccagaactatttttttaaaggctgacaaactgcataaatggtgacgtgacttctcttcctcttacatgctgaatcactggtggaaacactagaatatgcaagaattgcaataaaataaaattagacagatcttctctttgccttgaatattgcttccatgtattttgggaaagaaaaatttcatttataaatgaacatactaaaatagtcatgtatagttcctagtgttttaaattatttttatttattagaaagaaaatatatttttctttttttcattgtcagatatcttcccatatatcacagcaatgcaaaattaaaatgagtaagtggccagattccttaatgcacatttctcttctttctctcttttcgaggagaatgatggtcaccaccccaatttgtaatgaagggaaatggattactaaaacaaatttaagatgaccaacaatgtacacacatattttagtaaatcaaaaataaaaagtaaaagaagtggaggtgaatattatttccctctctcccagacaggtgtatgttttgatctgcattgacaccagctcttacaaatcagacttcattatcttcacagttgaaagtcatctctttgtagtttcagttttcctccagtgtttcttatcctttgttcatatatttagaagaaagagcttcttgcaatgtttctgcagttgccagatcaggtttaagcacccagctcaggatatgggaggaagtgtttatcggcacacctagaatatgaaggtcatgagccagaggcacccaggagcaggctctgttgttctcatggtgaggcctcctccaccatgttttatgctccttgtttcatacttctgagtcacccaagcaagttatgtggactgtgggaggatctggaatgttctttcccttattcagagcttttagcctgaaagttggtgaacatcaacgcatagttttacctaacaataggatctaagaagtatgcatgcttatcacaaatttttggtttaaaagtcagacaatgttcactgtcaaggaaatgacttttcttcaaattttcatttgctggctttccctccgttgcccag

SEQ ID NO: 1137 - DNA, 2832 bp, Rattus norvegicus
tcctgttgcccagaccttatataaaacgtcatgttcgcctgggcagcagagaagcacctagcactggcccagcggctgccgcctgaggtttccagaggaccacaatgaacaagtggctgtgctgtgcactcctggtgttcttggacatcattgaatggacaacccaggaaacctttcctccaaaatacttgcattatgacccagaaaccggacgtcagctcttgtgtgacaaatgtgctcctggcacctacctaaaacagcactgcacagtcaggaggaagacactgtgtgtcccttgccctgactactcttatacagacagctggcacacgagtgatgaatgcgtgtactgcagccccgtgtgcaaggaactgcagaccgtgaaacaggagtgcaaccgcacccacaaccgagtgtgcgaatgtgaggaagggcgctacctggagctcgaattctgcttgaagcaccggagctgtcccccaggcttgggtgtgctgcaggctgggaccccagagcgaaacacggtttgcaaaagatgtccggatgggttcttctcaggtgagacgtcatcgaaagcaccctgtaggaaacacaccaactgcagctcacttggcctcctgctaattcagaaaggaaatgcaacacatgacaatgtatgttccggaaacagagaagcaactcaaaattgtggaatagatgtcaccctgtgcgaagaggcattcttcaggtttgctgtgcctaccaagattataccgaattggctgagtgttctggtggacagtttgcctgggaccaaagtgaatgcagagagtgtagagaggataaaacggagacacagctcgcaagagcaaactttccagctacttaagctgtggaagcatcaaaacagagaccaggaaatggtgaagaagatcatccaagacattgacctctgtgaaagcagtgtgcaacggcatatcggccacgcgaacctcaccacagagcagctccgcatcttgatggagagcttgcctgggaagaagatcagcccagacgagattgagagaacgagaaagacctgcaaacccagcgagcagctcctgaagctactgagcttgtggaggatcaaaaatggagaccaagacaccttgaagggcctgatgtacgcactcaagcacttgaaagcataccactttcccaaaaccgtcacccacagtctgaggaagaccatcaggttcttgcacagcttcaccatgtaccgattgtatcagaaactctttctagaaatgatagggaatcaggttcaatcagtgaagataagctgcttatagttaggaatggtcactgggctgtttcttcaggatgggccaacactgatggagcagatggctgcttctccggctcttgaaatggcagttgattcctttctcatcagttggtgggaatgaagatcctccagcccaacacacacactggggagtctgagtcaggagagtgaggcaggctatttgataattgtgcaaagctgccaggtgtacacctagaaagtcaagcaccctgagaaagaggatatttttataacctcaaacataggccctttccttcctctccttatggatgagtactcagaaggcttctactatcttctgtgtcatccctagatgaaggcctcttttatttatttttttattctttttttcggagctggggaccgaacccagggccttgcgcttgcgaggcaagtgctctaccactgagctaaatctccaacccctgaaggcctctttctttctgcctctgatagtctatgacattcttttttctacaattcgtatcaggtgcacgagccttatcccatttgtaggtttctaggcaagttgaccgttagctatttttccctctgaagatttgattcgagttgcagacttggctagacaagcaggggtaggttatggtagtttatttaacagactgccaccaggagtccagtgtttcttgttcctctgtagttgtacctaagctgactccaagtacatttagtatgaaaaataatcaacaaattttattccttctatcaacattggctagctttgtttcagggcactaaaagaaactactatatggagaaagaattgatattgcccccaacgttcaacaacccaatagtttatccagctgtcatgcctggttcagtgtctactgactatgcgccctcttattactgcatgcagtaattcaactggaaatagtaataataataatagaaataaaatctagactccattggatctctctgaatatgggaatatctaacttaagaagctttgagatttcagttgtgttaaaggcttttattaaaaagctgatgctcttctgtaaaagttactaatatatctgtaagactattacagtattgctatttatatccatccagatatattttgtacatattataatcctagagagaaatgtcgtaggatttaattttagaaagaaaaaaattctgtttactattgtgacaaataaaagagataaaatatatttttaatagaaactttgtagtgttttccaataggtactatcaggtttccagtgtggaatgtttttataatataattttatctgtataaaatgtaatatcattttatagaaaaatgtattatgtactcagttgtttgtcagaaagtgtatgaactataaattatctaaatattagatgctctgagaaattgaatgtacctttatttaaggatttttgtgatcgcactatataaataacatcattaaagttttcaaattatttttcaaaaaaaaaaaaaaaaaaaaaaaaaaaaaaaaaaaaaaaaaaaaaaa

SEQ ID NO: 1138 - DNA, 3628 bp, Rattus norvegicus
ccaaagcgtacaccactcaatccttagcaagtgttgcatatctgataaacaccttggccaacaatgtcctacagatggctggatattcaggcatcgcagttacggagaatggaatcttcaatcaaccatatttcacaaacagttgatattcataaagagaaagtggcaagaagagaaattggtattttgactaccaataaaaacacttcaaggacccataagattattgcaccagccagccttgagcggccagtccgttatattcgaaaacctattgactacacaattttagatgacattggacatggcgtaaaggtgagtacccagaatatgaagatgggtggactgccacgtacaacacctccaactcagaagcccccaagtccccctatgtcagggaaggggacacttgggcggcactccccctatcgaacactggagccagtgcgtcctccagtggtaccaaatgattacgtacctagcccaacccgtaatatggctccctcgcagcagagccctgtgaggacagcttctgtgaatcaaagaaatcgaacttacagcagtgggagcagtggaggaagccacccaagtagtcggagcagcagtcgggagaacagcggaagtggtagtgtgggggttcccatcgctgttcctactccgtctcctcctagcgtctttccaggtcatcctgttcagttctacagcatgaataggcctgcctctcgccatacgccacccacaatagggggctcattgccctatagacgccctccttccataacttcacaaacaagccttcagaatcagatgaatggaggtcctttttataaccagaatccagtttcagatacaccacctccaccacctcctgtggatgagccagtgttcgatgagtccccacctccaccacctcctccagaggactcagaagaggaggaagcagctgtggttgagtacagcgatccttacgccgaagaggacccaccatgggcaccaaggtcttacttggaaaaggtcgtggcaatctatgattatacgaaagacaaggaggatgagctgtcctttcaggaaggagccattatctatgtcatcaagaagaacgatgatggttggtatgagggagttatgaatggagtgactgggctcttccctgggaattacgttgagtcccatcatgcattattcggagtaaagcccagcacagccgtgcttcttgttcatggctcaggtattcccagattagctagaggccctgggaattccctcccaggaaatatgatgaagcatacaaatgataaagttactctttttattactgttttggtttatcccctagtatcaaaacctgaaagccaagtctcgaacaagtggaacttcttgggtcactttgcattatgcctatctagattgaaaaatgccatttctcagtcacggaaaggcactaccaacatcgaacatatagctaaaatatataggaccaagactaacttgagaaaaaaatctgggatcttctcaggaatactgtacacccttggatttctctgtcctgcagaatctgagacattggatgctcattgcctctgctttggggctaacctcatggcctggtggacacccttgccctttactttcagtatatggagaggttggttccagtgtttaaatactttatttaactacttttggattgcttaaaaaggctgtttttcttctttaacactgtaaatcctgtgttctcttagcactggagtgctaggtgagttaatcccgaactcccttgcatcctgtcctgtttgtagattataaggatgacaaaatgtgagtctccaaacattcccagggttgttaccagtttgattttaatgcactgttgcatgagactgcattgctgatagcagccagtaaaaccgatgtgaaatgtggtaggtacttcaagtactgaggtgagcttgctggacacaaaggttcctaaggagctccaagccttgaggcactgtttcagagtagagcctaggaaatcagaccagctattactgttcttttgatatttaaacacccccccccacctcttttaagaagagactagttgtaagtctctgacagtcactggactgggaatgaaaggctgctactgtgctcttggaccattatcaatggcagtgttagctgatgccattttgcttctctcagcctatagaaaaatcaagtatcctcctgatttgaagtgattagactttaaagtagccactcctcgtaatagtctgaaccttgtgagtcagagtaaagagtttactggaaaagactaatatggataaaatacttaccagtcacactgatgaaaaccagtctgtatttgaaacaattggcatcccctcatctactgaaaagaagaggaagcaaagctgttgtgattcagatgcaggccttgcacatctgtctagcgagtctagaagaacaagtgttgtagatgcgagaagaaaggcaggctgtaaggacgcgctaatactccactcgtagatctgttatctgagcctgaggcttcagtctgtggcaagtctcatacccaaacagtgtccttctcaagaccctttttgctttaaggttgtaggttttgtttgtttcagacacggtgctcttctgcttctgcttagcctctcaaatattaggactacaaggaggaccctacaccaggagcaggatttttggttttaatacacgttgcatgcacatcagcagctattacacttttagactttttctaaatgctttggatttttctttaatttgcttctagtgcacttttcacttcatggtttttgttaggtcatcttgactgtcttcaggatatggccctgaagccctctgaacctttagctccattatggatataagcaagagtgtatatgaacatttaactctgagtgtattggtacatggaaacttgtgaaaatagctatactaattatttatttaagtagccttttgctgaacaagcttagggattgataagacattggaaacccagccaacagttagctttttgtagtcacagaaacaactggtggtaggcactggaacacagctcaccttctgaacctctgctgaattagggtttgcaggaaacacgtgtgcaatcctttgtgctgaagatgtgcgctgggggtgatccatgggacaggtgaccccacttgatccatgggacaggtgaccccactccttgtattattgagtactgatgtgattttaaaaacaaaacacagaatacggtctgttggccttttttccacccattttaaactttagcaattttttttgaaatctatgaattgtcaaggaaggatactctgaacaatgagccaggcctacaggtaattggagccttttaatgtatgtaatattttatagattgcatgctattaatactgtgaggttatttcctgttttattgtaaattttcccacttatttgcccattaacaaaaatatggttgatattaggaattttaaacaaatgttgaaactttctgaccagattgcaaggcagtttaccgagacacaggtactgagggctctggtcaatcctgaaatgtctgactctgtgcacagtttctttaccctttaaaaaaaaa

SEQ ID NO: 1139 - DNA, 2954 bp, Rattus norvegicus
ccggctccggagcaccgcgacttcgttcggtccgactccccggcggggtggcggcggccgggtccccacggtggcggccggagcagcggctgcaggagcccggctctaggatgaagttcaagcccaaccagacgcggacatacgaccgcgagggcttcaagaagcgggcggcctgcctgtgcttccgcagcgagcaggaggacgaggtgctgttggtgagcagcagtcggtacccagaccaatggatcgtgccgggaggaggggtggagccggaggaggagcctggcggtgctgctgcaagggaagtgtatgaagaggctggagtcaaaggaaaattaggcagactcctgggaatatttgagaatcaagaccggaagcacagaacatatgtttatgttctgacagtcactgaaatattggaagactgggaagactctgttaacatagggaggaagagagagtggttcaaagtggaagacgcaatcaaggttcttcagtgtcacaagcctgtccacgcagagtacctggaaaggctgaagctggggtgttctccgaccaacgggaattccacggtcccttccctcccagataacaatgccttgtttgtgactgccgcaccaccctctggggtgccatccagtataagatagagagctggggcccctcccccaccgtgtcatggcacatgtcagagggagagaggcttttttacttctaacacatctgactgctgctggcagactctagatttgccatgcaggggtttcaaataatttgcatgtatttcagatgctttcaactcttttaaaataaataacaaaatagcaaaaatactttaagatgccaaagccatgtggattttttttaaagccttaattgtaagtctaccccattactttggttctcatttttataacctttcttaaaatttcacttttgaacactcaacattctatggtttattttgacagatcaactggttgttgggtatgtttttgccctaatatttttttcttacagtatcaaatagtcaccaaatctttgggaattaatgaaaaatattcttggtatttaaaaaaatatatatgtgccccaaaacttgtttaagagagtcgcattctctccacttgtaagctgcaggtttgcgctgatttgtatggacgggccagttgcctttgaccaagcactcaagtttactctatccgagaatttgtacacagcaagaattatgtcagtgcacaggcactgcctcccctctgacacggtgattccatatgaatcactccatttttagggaaaactgtcaggaacttgcctgtggcaccgcacagctcattctgaaactgttcagagaagtctgttcagcacgctctgcggctgcttcctccctgctccttccgacacagactgtgttaggggccacattgctcccatggccagtgctcttcatattttcagtctagcaacaacactgttgaccagtggattagactctaaccttagatacagcagtcactgactggcatccaaggttagatcacactaaacaaaatggctgtcctaggcctaagacactgtcttgagtgtcagtaagcagcttgtcagatgagtgtgagggaactagaactatgttaccttgtctttgtgctctctcaaaacgggccaccccatggaaaagtacctacatttccttcaggaagtcatggaggaagtgaagggggaggggggagaggaaaagatctttcgcagtacagttaggacatctgtaacctgttaacctttaaattgtaatgttgctgctgccaatgtccttacctgtaaggaaggaaaatgagatctcgtgcccaaatgcagcagaactaaaaacattaggttacaaagcagaaaaacccaaccagtagtgttcattctaaattatgtagcgtaaacaaatgtgatcgtccagaccttttctatttttctttgtacagaggtcatgtactctgggtgtgttttaaaagaaacattttaaagaaacccacagattgacattttctatcttttcgttttctcacgattctctgcaatttttccatgtactaaacacaacagaaactggactgttttgtatagaatactgcttccagctaaaaccatcacaagtgcccgggagtttatgtggacatgatagatactctgggcggtaataatgcatgaacctgttttataaactcttgaactgtgtattgccatgtaaaatatgtacagtattaatgtcaaccatctctttaaaagttagcctatgaacattgttgtataatttctttggtcagaaacatttggactaagtcatgtcacctgggtcaggattttcttcaatgccgtgtagcaaaactgtctttagtctatgcaaatagcgagtcactgagtgtgacagaatgcaacttcactgttaaacttcacctgagggttcctcattctggaatccagactgcaagattataaaggaaaagacctaaggcaattcagttctttttgcaaatcaattgaatccacgagagatgtctaccagcgagatgtttaccagcccagccgcctgcagcctgcagcctgctgtgtgtgcttatttgtgcgctgaataaaatggggcagctaaattctccagttccatatgcctccgaagttcaaagaaaagaaagcaaagtaacatgttagacttgacttgtgtggcggggtaaagaaatggcatcttcccactaagaacgaaccatccagttcttttgtcagtcacactatgaaacagggaaggtgaagggaagaaatggttatgtgtgcacgaatcgctttgcatggtctcatgagatggctgcattcgaactgttttaagaattgtaaggatcttgacttttttacatttggaaacatcaaataaaaacaaacataatctgtgaaaaaaaaaaaaaaaaaaaaaaaaa

SEQ ID NO: 1140 - DNA, 3170 bp, Rattus norvegicus
cccgtcatgtctaacgaagtagaaacaagcacaaccaatggtcagcctgaccaacaggctgcaccgaaagcaccatcaaagaaggaaaagaagaaaggttctgaaaagacagatgagtatctgttggccaggttcaaaggtgatggtgtaaaatacaaggccaagctaatcggtattgatgatgtgcctgatgcgaggggagacaaaatgagtcaggattctatgatgaaactcaagggaatggcagcagctggtcgctctcagggacagcacaagcaaaggatctgggtcaacatttccctgtctggcataaaaattattgatgagaaaaccggggtaatagagcatgaacatccagtaaataagatttccttcattgctcgtgatgtgacagacaatagagcatttggttatgtgtgtggaggagaaggccagcatcaattttttgctataaaaacagggcaacaggctgaaccattagtcgtcgatcttaaagacctttttcaagttatctataatgtaaagaaaaaggaagaagaaaagaaaaaggttgaagaagccaacaaagcggaagagaatgggagtgaggccctaatgacccttgatgatcaagctaacaaactgaagctgggtgttgaccagatggatttgtttggggacatgtctacacctcctgacctaaataatccaacagaaagcagagatatcctgttagtggatctaaactctgaaatcgacaccaatcagaactctttaagagaaaatccattcttaacaaatggagtcacctcctgttctctccctcgaccaaagcctcaggcatccttcttgcctgaaagtgccttttctgccaatctcaacttctttcccacccctaatcctgatcctttccgtgatgatcctttcgcacagccagaccaatcggcaccctcttcgtttcattctctcacatctgcagatcagaagaaagcgaatccgggtagcttgtctactccacagagtaaagggcccttgaacggtgatactgattactttggtcagcaatttgaccagatctctaaccggactggcaaacaggaagctcagggaggcccatggccctatccaagttcgcaaacccagcaagcagtgagaactcaaaatggggtatctgaaaaagaacagaacggcttccatatcaaatcttccccgaacccttttgtgggaagccctcccaaaggactatcggtaccgaatggcgtaaagcaggacttggaaagctctgtccagtcctcagcgcatgactccatagccattatcccacctccacaaagtaccaaaccaggaagaggcaggaggaccgctaagtcttcagcaaacgacctgcttgcttcagatatctttgcctcagaacctccaggccagatgtcccccacaggacaacctgcagtcccacaggcgaactttatggatctcttcaaaaccagtgctcctgccccaatggggtcggggcccctcgtaggtctaggtactgtcccagtaacacccccccaagcaggaccttggacacctgttgtcttcactccttctacaactgtggtcccaggagccataataagtggccagccttccggttttggtcagccactcgtctttggtacaaccccagcagtgcaagtttggaatcagccttcatcatttgcaactgcagcttcccctccacccccggcagtttggtgtcctaccacatctgtggcacccaacacttggtcatccacaagtcccctggggaatccttttcagagtagtaatatctttccaccttccaccatatccactcagtcctttcctcagcctatgatgtcctctgttctggtcacacctccccaaccacctccccgaaatggcccactaaaggacactcttagtgatgccttcactggcttagacccacttggggataaagaggtcaaggaagtgaaagaaatgtttaaggacttccagctgcggcagccacctcttgtaccctcgaggaagggggagacaccttcctctgggacctcaagcgccttctccagttacttcaacaataaagttggcattcctcaggagcatgtagaccatgatgattttgatgccaatcaactgttgaacaagattaatgaaccaccaaagccagcccccagacaaggtgtcctctcgggtaccaaatctgctgacaattcactcgagaaccctttctctaaagggttcagctcaacaaacccctccgtggtctctcagcctgcatcttctgatgcccacaggagcccttttggaaatccttttgcctaacttctttctgaagttgtaatgctgactgactatccagatgagcaaaaggctggctttggtcaaggattaagcagatagccagaaacgtgctgacctctgtccttgctccagctttgatgtattacctgttaccctacttgtctttgcctcatgtacttgtaaaaagcctttcactctctctaggctaaagctacactgaaacaatggctttacataaattaaactcctaagctctctagctccaatataaatgaagtagcttccctaccaaatccttgtctgtcgtgctcctagaaccttccagaatattctccgttttaccctcaatttgggaggtgtggccacctttacccttaatatcacactgccttgagtaaatgtccaaatccttgtagctctcaaggtcatttgtgattcctggtgtgcatcataaatctaaacattaatattaacattaataggaaagcaagacaccttgcttcccattcccactcagacaagtttttttatgataaaatgaaagcaagactaacttctcgaatccacccaaggaccatttcgagatggtctttctcagctaattgcatcatttaccaatcctactccaagtggtgtttacatttgacttgaaaaggagaaaggtctaactcaaaacataaggcattattcaaagctaataaaacaatttctccctggggccccacattgttttcattccagacactttgcagctgtttgaccctgatgatattatgccctacattttccttgaagattctgattttatttcatgtgattcttttttctcaataaagatgattattgtgtgcatttactaaacaaacaaaaaaaaaaaa

SEQ ID NO: 1141 - DNA, 1990 bp, Rattus norvegicus
tccggcttctaccactgtctgggatgaagcagccagcaaccatgaagtggagcgcatccatttccttccttctcctgctaaattttgctgaacccagagtactgcacacaaatgagtttggaatagaatccacgttagactcttcccaatgcccgacagagaaaaatatgtttaacgtagctaccattgtcgttgcccagtttgttcaggatgccacaaaggccgaagtaaacaaaatgagtagcgatgcgttggctgcaatgaaggaaaacactggcgatgggtgtttagaaaaccagctatctgtgtttctggatgaaatttgccacgagacggaactctctaacaagtatggattctcaggttgctgcaaccaaagcggggtggaaagacaccagtgtctgctggctcgcaagaagaccgctccagactctgtcccacccttccactttccagaaactgccgagagttgcccagcatacgaagaaaacagggcgatgtccataaacacgttcatctacgatgtgtcgaagaggaaccccttcctgtatgctcccaccattctttacttagccgctcagtatgacaaggcagttccagcatgctgcaaagctgacaacatggaggaatgcttccagacaaagagagcatcaatggcaaaggaattaagagaaggaagcatgctcaatgagcatgtgtgtgcagtaataagaaagtttggatcccggaatctccaggctgtactcatcattaaactaagtcaaaagtttcccaaagcaaatattactgagattcggaagctggccctggacgtggcccacatccacgagcagtgctgccacggcaacgcgatggagtgcctacaggatggggaaagcgtcatgacacatatgtgttctcaacaagaaattctgtcgagcaaaacagcagagtgctgcaaactacccaccatcgagctcggctattgcataattcatgccgaaaatggcgacaaaccggaaggtttaactctgaacccaagcgagtttttgggagacagaaattttgcccagttttcttcagaggaaaaactcctgtttatggcaagctttcttcatgaatattcaagaaatcaccccaaccttcctgtctcagtcattctaaaaactgctaagtcataccaggaaattttggagaagtgctcccagtctgaaacgccatcgaaatgccaggacaatatggaagaagaattgcaaaaacacatccaggagagccaggcactggccaaacaaagttgtaatctctaccagaagttaggaccctactacttacaaaatctgttcctcattggctacacgcggaaggctcctcagctgacctcagcagagctgatagacctgacagggaagatggtgagcattgcctcaacgtgctgccagctcagtgaggagaaacggtccgcctgcggtgagggactggccgacatttacattggacacttgtgtttaagacatgaggcaaaccctgtgaactccggtatcaaccactgctgcagttcctcgtattccaacaggaggctctgcatcaccagctttctgagggacgaaacctacgtccctccaccattctctgaagacaaattcatcttccacaaggatctgtgccaagctcagggccgagccctacagaccatgaaacaagagcttctcattaacctggtgaaacaaaagcctgaaatgacagaggagcagcacgcggctgtcactgctgatttctctggcctcttggagaagtgctgcaaagaccaggatcaggaagcctgtttcgcaaaagagggtccaaagttgatttccaaaactcgtgaggctttgggggtttaaacatctccaggaggaagaaaggacaaaaaaatgtgtcgacgctttggtgtgagcttttcggtttgatggtaactggtggagacttccatgtgggatttctatgccttaggaataaagacttttcaactgtt

SEQ ID NO: 1142 - DNA, 735 bp, Rattus norvegicus
acgcagctttgagtccacacctctgtctacgcagcagctatgccgccgtacaccattgtgtacttcccagttcgagggcgctgtgaggccacgcgcatgctgctggctgaccagggccagagctggaaggaggaggtggttaccatagatgtctggcttcaaggctcgctcaagtccacttgtctgtatgggcagctccccaagtttgaagatggagacctcaccctttaccaatctaatgccatcttgaggcacctgggtcgctctttagggctttatgggaaagaccagaaggaggctgccttggtggatatggtgaatgatggggtggaggaccttcgatgcaaatatggtaccctcatctacactaactatgagaatggtaaggatgactatgtgaaggccctgcctgggcatctgaaaccttttgagaccctgctgtcccagaaccagggaggcaaagctttcattgtgggtaaccagatttcctttgcagattacaacttgctggacctgctgctggtccaccaagtcctggcccctggctgcctggacaacttccccctgctctctgcctatgtggctcgcctcagtgcccgccccaagatcaaggcctttctgtcctcccctgaccatttgaaccgtcccatcaacggcaatggtaaacagtagtggacgaagggacaggaactccttgtcccccttttcccagactaataaagtttgtaaggcaga

SEQ ID NO: 1143 - DNA, 2460 bp, Rattus norvegicus
ccccggcgccaacctagctgccccgcccgctgccgacgtccgacatgctgagccgtgctttgctgtgcctggccctggcctgggcggctagggtgggcgccgacgctctggaggaggaggacaacgtcctggtgctgaagaagagcaacttcgcagagccggcggcgcacaactacctgctggtggagttctatgccccatggtgtggccactgcaaagcactggccccagagtatgccaaagctgctgcaaaactgaaggcagaaggctctgagatccgactagcaaaggtggacgccacagaagagtctgacctggcccagcagtatggtgtccgtggctaccccacaatcaagttcttcaagaatggagacacagcctccccaaaggaatatacagctggcagggaagctgacgacattgtgaactggctgaagaaacgcacaggcccagcagccacaaccctgtctgacactgcagctgcagagtccttggtggactcaagcgaagtgacggtcatcggcttcttcaaggacgcagggtcagactccgccaagcagttcttgctggcagcagaggctgttgatgacataccttttggaatcacttccaatagcgatgtgttttccaagtaccagctggacaaggatggggtggtcctctttaagaagtttgatgaaggccgcaacaattttgaaggtgagatcaccaaggagaagctattagacttcatcaagcacaaccagctgcctttggtcatcgagttcactgaacagacagctccaaagattttcggaggtgaaatcaagacacatattctgctgttcctgcccaagagtgtgtctgactacgatggcaaattgagcaactttaagaaagcggccgagggctttaagggcaagatcctgttcatcttcatcgatagtgaccacactgacaaccagcgcatacttgagttctttggcctgaagaaggaggaatgtccagctgtgcggcttattaccctggaggaagagatgaccaagtacaaaccggagtcagacgagctgacagctgagaagatcacacaattttgccaccacttcctggagggcaagatcaagccccacctgatgagccaggaactgcctgaagactgggacaagcagccagtgaaagtgctagttgggaaaaactttgaggaggttgcttttgatgagaaaaagaacgtgtttgttgaattctatgctccctggtgtggtcactgcaagcagctagccccgatttgggataaactgggagagacatacaaagaccatgagaatatcgtcatcgctaagatggactcaacagccaatgaggtggaagctgtgaaggtgcacagctttcccacactcaagttcttcccagcaagtgcagacagaacggtcattgattacaacggtgagcggacactagatggttttaagaaattcttggagagcggtggccaggatggagcgggggacaatgacgacctcgacctagaagaagctttagagccagatatggaagaagacgacgatcagaaagccgtgaaggatgaactgtagtgcagaagccagatctgggcgcctgaacccaaaacctcggtgggccatgtcccagcagcccacatctccggagcctgagcctcaccccaggagggagcgccatcagaacccagggaatctttctgaagccacactcatctgacacacgtacacttaaacctgtctcttctttttttgcttttcaattttggaaagggatctctgtccaggccagcccatcttgaagggctacgttttgttttaattggtggtgtacttttttgtacgtggattttgtcccaagtgcttgctaccatatttggggatttcacactggtaatgtctttcctgttagagaggtttatgctatcacttcagatttcgtctgtgagatgtttcatcttcctgacatgtctccatgtcgaggtacttgttccaccacgcagacctccctgagaccccttcctgccctgcgcaggaggcgatggttctgggtcgtatgctctctctctctccaccttgtactagtgttgccatgacagcatggcttttgtagtttgcatttaacctggggatttctgcatcctgtcagagggtgggtccccacgtgtggaaaagagacagtggtggcttgctgccaggctcaggccaggcctggacagctctcactcttcttaagccagaactaccgaccagccggccggctgtgggcacattactctggctgctggatcctcttccagcatggcatgtggcctgtgtgaggcagaaccgggacccttgattcccagactgggagtcagctaaggacactggggctgaatgaaatgcccattctcaaggtctatttctaaaccataatgttggaattgaacacattggctaaataaagttgaaattttactaccat

SEQ ID NO: 1144 - DNA, 1705 bp, Rattus norvegicus
  misc_feature (1)..(1705): n = a or c or g or t
gttctcacctccccagctctcacctctccaggcctgatctctacaactctcacctccctgattctcacctccccatttctcaccttcccaactcttacctccctagttctcacctcctctgatctcaccttcctagctcttaccccctcagttctcactccccaagctctcacctccccagttctcacctcccaagctctcacctccccagttctcaccttcctagctctcacctccccagttctcacctctcaaactcttattacctccctggctttccagttcttaccaccccagctctcacatccctagattttacacaaagattctttgccctcttagaatagtaccttgcggagagtaaacctggacgaattcctaaaaagccaagaggagtttgattctcaggacacaacggacatcaagtccaaacttcaggtgcgtggggctgctgagggcttagggatcccacctccacctttcccagcctttttggagaggaaagtagagctttctcctttctagagggatctgactgtgccttggtgtctctccacagaaacttaagtgttgtattcctgcagctgcgagcgactctgtggtaagctgacctcccttccatgtgtcaaggttatgcccttgctcatgaccagacttaaagcctgctatagcccncagcagcctcttcacatccaatgcctcttttttggttcgtcacagttgccaggtgtctacaataaagatctggatgactttaagaagaaactgagattctacgtgatccatcttaaggacctgcagccagtgtcagtctctagaccacctcagcccacatctagctctgacaactttcgccctatgaccgtggaatgttaaaacagcaggcagagcaactggagcctgaatgttcctcatggcccacgcccagacggatttcacattcccttatgccatcagatgtcttaccaatttatctactttctgaaatgtgctaattacctaattatgcccctattttattctattaaggctatttatgtatttatgtatttatttatttattaccttctgcaatgtgaagtatatatgttttagctgaggaggaatttctccctgttttgaaaagaagttccgagagagactggggggcgtgttcatttgtccctcgtgttttaaacaggcttttaaacccttgtggaaataaataactttgaatgaattggttttgtcttgtccagtttcttagtttggcatcatctctgtaacagtcttagaggatacttgtccagataccacagtttggctacacagcatacaacatgtaccagatcatggtctggacatttaacctgtactatttaatctattcttcactccaaaccagaatgtgtgatctctgttttatgggaccatggaagtccagtgtggcaaggtaaggccaagtaaatgcagcttctaagttgtgcccccctctaggacttcattcaggcttggcccctggaacatgctactgagtactgaaagtcattagaatgctccctctagtggtcatacttagaactgcagcagtgcctctaacagctcccatagtagaagctgttcagtaccattctgagtccccatctggcagtactctctgaggatgcaggttactcggacccagaaatcctacttcttccagaagtttccatgcctgcctaagctt

SEQ ID NO: 1145 - DNA, 1485 bp, Rattus norvegicus
cgcagtgccagggaggtgtgaatgaggcaggatgaactggacaggtctatacaccttgctcagtggcgtgaatcggcattctacagccattggccgagtatggctgtccgtcatctttatcttcagaatcatggtgctggtggtggctgcagagagcgtgtggggtgatgagaagtcttctttcatctgtaacaccctccagccgggctgtaacagcgtctgctatgaccattttttccccatctcccatgtgcgcctgtggtccctgcaactcatcttggtttccaccccagctctcctcgtggcaatgcacgtggctcaccaacaacacatagaaaagaaaatgctacggcttgaggggcacggggacccccttcacctggaagaggtaaagaggcacaaggtgcacatctcagggacactgtggtggacctatgtcatcagtgtggtgttccggctgctgtttgaggctgtcttcatgtatgtcttctatctgctctacccgggctatgccatggtgcggctggtcaagtgtgaggccttcccctgccccaacacggtggactgcttcgtgtcccgccccactgagaaaaccgtcttcactgtctttatgctcgccgcctccggcatctgcattatcctcaacgtggcggaggtggtgtacctcatcatccgggcctgtgcccgccgtgctcagcgccgctccaatccgccctcccgcaagggctcgggcttcggccaccgcctctcacctgaatacaagcagaatgagatcaacaagctgctgagcgagcaggatggctctctgaaagacatactgcgccgcagtcctggcactggggccgggctggctgagaagagcgaccgatgctcagcctgctgatgccgagtaccaggcaacctcccatccaacccctccctcaccccacccaggcctgcccctccttctcctatgctggtgagcaggcctctgcctcctagggattactccatcaaaccttccctccctccctactccccttcctcagagagtcttctgtcaaagacctggccggcttgggagtggggagccacttctgcaccagggctcaaggttattgagggtgtgggcaattctttctgcctataccctttcctcttccctctccctgagatgagggatgagatgttctgaaggtgtttccaattaggaaacgtaatcttaacccccatgctgtcaggtaccccactttgggagtcatgtcagtggggagggctgtgagcaagcagagtggaggaggggctctgcactgtggatggagaagggaggggagcttgccttgctgcctgctacaaggaaaaggaggacacatctagggtgggggagttctggagggagaagcaggcagataaatcagagtgggggttggtcagggctgcccccagtccccagttcccaaggcctctctctctgaaaatgttacacattaaacaggattttacagt

SEQ ID NO: 1146 - DNA, 2214 bp, Rattus norvegicus
tcgcggtcatggaggcgccgatcgtcttgctgctgctgctatggctcgccttggccccgacgcctggcagcgcctcttcggaggctccgccgctggtcaacgaggacgtgaagcgcacggtggacctgagcagccacctagccaaggtgacggctgaggtggtcctggcgcacccgggcggcggctctacagcacgagccagctctttcgttctggccctggagcccgaactggagtcgcgacttgcacacctaggcgtgcaggtaaagggagaagatgaggaagacaacaacctagaagtacgagaaaccaaaatgaaggggaaaagtgggaggtttttcaccgtcaagctcccagttgctcttgatcctgggtccaagatctcaatcgttgtggaaactgtctacacccatgtgcttcatccatacccgactcagataactcagtcagagaaacagtttgtggtgtttgagggcaaccattacttctactctccctatccaacaaagacccagaccatgcgagtgagacttgcttcccgaaatgtggagagccataccaagctggggaacccctcaaggtctgaggacatcctggactatgggccttttaaagacatccctgcctacagtcaggatactttcaaagtacattatgagaacaatagccctttcctgaccatcaccagtatgacccgggtcattgaggtttctcactggggcaatattgctgtggaagagaacgtggacttgaagcatacaggtgcggtgctgaagggacctttctcccgctacgattaccagaggcagcctgacagtgggatctcctccattcgttcttttaagaccatccttcctgctgctgcccaggatgtgtattaccgggatgaaatcggtaatgtttccaccagccacctccttattttggatgactccgtggaaatggaaatccggcctcgatttggtctctttggagggtggaagacacactacatcgttggttacaacctcccaagctatgagtacctctataatctgggtgaccagtatgcactgaagatgcggtttgtagaccacgtgtttgatgagcaagtgatagattctctgacagtgaagatcatccttcctgagggagccaagaacatccaggtagacagtccctacgatattagccgggccccagatgagctgcattacacctacctagacacattcggccgcccggtgattgttgcttacaagaagaatctagttgaacagcacattcaggacattgtggtgcactacacattcaacaaggtgctcatgctgcaggagcctctgctggttgtggccgccttctacatcctgttcttcaccgtcatcatctacgtccgtctagacttttccatcaccaaggacccagcagcagaagccaggatgaaagtggcctgtatcacagagcaggtcttaaccctggtcaacaagaggttaggcctctaccgtcactttgatgagactgtcaatagatacaagcagtcccgggacatctctaccctcaatagtggcaagaagagcctagagacagagcacaaagctgtgaccagtgagattgctgtgctgcagtctaggctgaagacggagggctctgacctgtgtgacagggtgagcgaaatgcagaagctggacgcgcaggtcaaggagctggtactgaagtctgcggtggaggcagagaggctggtggctggcaagctcaagaaggacacatacatcgagaatgaaaagctcagctcaggaaaacgccaggagctggtcaccaagatcgaccacatcctagacgctctgtagctcttgtctccagagcaggcctgggtggcctacacttctggatggaataggtagagggaggaagttgtgattagcctaagacctcaagaaaaaagctgaggcccatccatggctgtgtaagaagcttgtcccttatttctgaatggttctcttttttacaaaaacaaaaacctaaacaaaaatcctgcccaaaaaacaaacttggttgtgttttgagcaaaagcattttgagtagttgattgctgttttgttttgatacctgggtattttttctgtctgtaagccctgttttatggccttctgattcctaatgtttggttcttttgtgagcgtatgcatggttttttaaaagtgtgtatgaccaaataaaaataaaggagggactgtg

SEQ ID NO: 1147 - DNA, 988 bp, Rattus norvegicus
caggatggtggacagcgtgtaccgtacccgctccctgggggtggcggccgaagggatccccgaccagtatgcggatggggaggccgcacgtgtgtggcagctgtacatcggggacacccgcagccgtactgcagagtacaaggcgtggttgcttgggctgctgcgccagcacgggtgccaccgggtgctggacgtggcctgtggcacaggagtggactcgattatgctggtggaagagggctttagcgtcacgagtgtggatgccagcgacaagatgctgaaatacgcactgaaggagcgctggaaccggaggaaggagccagcctttgacaagtgggtcattgaagaagccaactggttgactctggacaaagatgtgccagcaggagatggctttgacgctgtcatctgccttgggaacagttttgctcacctgccggacagcaaaggtgaccagagtgagcaccggctggcgctaaagaacatcgcaagcatggtgcggcccgggggcctgctggtcatcgaccaccgcaactacgactacatcctcagcacgggctgtgcacccccagggaagaacatctactataagagtgacctgaccaaggacattacgacgtcagtgctgacagtaaacaacaaagcccacatggtaaccctggactacacagtgcaggtgccaggtgctggcagagatggcgctcctggcttcagtaagtttcggctctcttactacccacactgtttggcgtctttcacggagttggtccaagaagcctttgggggcaggtgccagcacagcgtcctgggtgacttcaagccttacaggcccggccaggcctacgttccctgctacttcatccacgtgctcaagaagacaggctgagcctggctccggctcccaccctaagaccatcgcctaccacagatattgcagagatgtggggggcaggcaaacagggagtcgacaatacagccttcccttgcc

SEQ ID NO: 1148 - DNA, 1412 bp, Rattus norvegicus
tggtctctgcttctctggatcccgaaggagggcagaaggaagaaaacggctcaatgatgagggtgattcgagtgggcacccggaagagtcagctggctcgcatacagaccgacactgtggtagcgatgctgaaaaccttgtaccctggcatacagtttgaaatcattgctatgtccaccacaggggacaagattcttgatactgcactctctaagattggagagaagagcctgtttaccaaggagctagaaaacgccctggaaaaaaatgaagtggacctggttgttcactccctgaaggatgtgcctaccatactacctcctggctttaccattggagccatctgcaaacgggaaaacccttgtgatgctgttgtttttgagggaaagtttattggaaagaccctggaaaccttgccagagaaaagtgccgtggggaccagctccctgaggagagtggcgcagctacagagaaagttccctcacctggaattcaagagtattcggggaaacctcaacacccgcctacggaagctggatgagcagctggagttcagtgccattatcctggctgtggctggcctacagcgcatgggctggcagaaccgggtgggccagatcttgcacccagaggaatgcatgtatgctgtgggtcagggagccctggcggtggaggtccgagccaaggaccaggatatcttggacctagtgggtgtgttgcatgatcctgaaactctgcttcgctgcattgctgaaagggattttctgaggcacctggaaggaggctgtagcgtgccagtagcagtgcatacagtgatgaaggatgggcaactgtacctgactggtggagtctggagtctagatggctcagatagcatgcaagagaccatgcaggccaccatccaggtccctgttcagcaagaagatggtccagaggatgacccacagttggttggaatcactgcccggaacattccaagaggagcccagctagctgctgagaacctgggcatcagcctggcaagcttgttgctcaacaaaggagctaagaacatcctagatgttgcacggcagcttaatgatgtgcgctaactggcgacgtcggcacaggaaccgaaccccagctgtcactccagtgcctatgtctggctgtcaagtgccctgtgctccttaacaaggggaatgattatcccaggagattgaacagagttgttgagacttcggccttggaagatatgcctcaacttggggcctccatgactgcctttccctcagtagtttgtgggcttcatctctttagagaaagtccatgccaatcttttatgtaaccaatgccactaatcagttcagaatgtggttctcctggagttgggggaagatatgaataaacccaaagccctttaaccgtaaaaa

SEQ ID NO: 1149 - DNA, 1733 bp, Rattus norvegicus
cgtccggctcgctatgcgctcctccgcggctttggcgcttctgctgtgcgccgggcaagtctttgcccttcctgtgaacagccctatgacaaaaggggacactaaggtgatgaagtgtgtcctggaggtcatctccgactcgctgtccaaacccagccccatgcctgtcagccctgagtgtctggagaccctccaaggagatgagagggtcctctccatccttcgacaccagaatttgctgaaggaacttcaagacctggcgcttcaaggtgccaaggagcgggcccagcagcagcagcagcagcagcagcagcagcagcagcaacaacaacaacacagcagctttgaggatgaactctcggaagtatttgagaaccagagccctgcagccaagcatggagacgcagcatcagaagccccctccaaggacactgtagagaagagagaggattctgacaaggggcaacaggatgcctttgagggaaccacagaaggacccagacctcaggcctttccagagcccaagcaggagtcctctatgatgggaaacagtcaatctccaggggaggacacagccaacaatacccaatcaccaaccagcctccccagccaggagcatgggattccacagaccacagaaggcagtgagagaggtcccagtgcccagcagcaagccagaaaagccaagcaagaggagaaagaggaagaggaggaggagaaagaggaagaggaggaggagaaagaggagaaggcgatcgccagagagaaggctgggcctaaagaagtccccacggcagcatccagttctcacttctattcaggctacaagaagatccagaaagatgatgatggtcagtcggagtctcaggcagtgaatggaaagacaggggcttctgaagctgtgccatctgaagggaagggggagctggagcactctcagcaggaggaagatggggaagaggccatggcagggcccccccaaggtctcttcccaggtgggaagggccaggagctggaacgtaagcagcaggaggaggaagaggaagaggagcgtctgtccagagaatgggaggacaagcgatggagcaggatggaccagctggccaaggagctgacagcagagaagcggctggagggggaagatgaccctgaccggtccatgaagctctccttccgggcccgggcctatggcttcagggaccctgggcctcagctacgccggggctggaggccatcttccagagaagacagtgtggaggcccgaggcgactttgaggaaaagaaggaagaggagggcagcgccaaccgcagagcagaggaccaggagctagagagcctgtcagccatcgaggcagagctggagaaggtggcccaccagctgcaggctttgcgacggggatgaggcactggctggtggggtccggccatggcttcaaggcccaactgctgctcaagtagggaggcttccagcctcagagcccaggttaccccttgccccttcccttctcttgctctcagcccctgccctggacacttctgcagggcagccctgaaagtcaacacagattctttctcggmcacaggcagctttctagaagtttctcttccaccttctaatccatggggcacmctgcagtagttctgatctttgggcgaaagccgagaactcctgactattaagatattccagataaaatttattgaaggaagaataaacctgctttgggctcttc

SEQ ID NO: 1150 - DNA, 1404 bp, Rattus norvegicus
gagcctccaccgccgcctgcagcccccgcatcttcttctggggcccggtcgccagcgcagtcgcctcggtcgctgtcgccagcgttgtctcagtttagagagggcaagatggcctcagccacagactctcgatatgggcagaaggagtcctcagaccagaacttcgactatatgttcaagatcctgatcattggtaacagcagtgtgggcaaaacctcattccttttccgctacgcagacgactcttttactccagcctttgtcagcactgtgggcatagacttcaaggtcaaaaccatctaccgcaatgacaagaggatcaagctgcagatctgggacacagcaggacaagagcggtaccgaaccatcaccacagcctactaccggggcgccatgggcttcattctaatgtatgacatcaccaatgaggagtccttcaatgcagtgcaggactggtccactcagatcaaaacttactcatgggacaatgcccaggtgctgctggtggggaacaagtgcgacatggaggacgagcgagtggtgtcctcagaacgaggccggcagctggccgaccacctgggctttgagttctttgaggccagcgccaaggacaacattaatgtcaagcagacctttgaacgtctggtggacgtgatctgtgagaagatgtcggagtccctagatactgcagaccctgcagtcacgggtgccaagcagggcccacagctcaccgaccagcaggcaccacctcatcaggattgcgcctgctgaaccacacttcccttccccaccgccaggggcgcgtcccccatccctgtcaccctatttattattgtagctatttatttatttattgaggatgcgccgcgagcgcacccccttcccgccctgtacatacccccacccagctctgccgtggtatattgtggtcagtgctgcttcctctccttttagaaacaccccccccccttcccacttttgtttttgtaaaccgtcccatccacagttgtcagttgtgaagaggggaccagatgtcactctgcagcaggctgatgggagatggcgggcctgccagccctcaggctgggggatgtgccacgtggaccacttggttgacagactggcttcctgcttgcctgggccttctgccctatactttgggatagatggggtaaagggggatatagtcaactactttgtaataccccccaaactgttcttacgtcatgagtgtcaaatgtgtccccccacctccctagaagttatgaacactatacacagtcaataaagcgaatggaacttgctgagacccagccggcccagcccctgcacccaccccacaaggcagtccttgacattaaagagagaatttaatgaaaaaaaaaaaaaaaaaaaaaaaaaaaa

SEQ ID NO: 1151 - DNA, 487 bp, Rattus norvegicus
aaaacctctctgttcagcacttcctctctcttggtctggtctcaacggtcaccatggcgagacccttggaggaggccctggatgtaatagtgtccaccttccacaaatactcaggcaacgagggtgacaagttcaagctgaacaagacagagctcaaggagctactgaccagggagctgcctagcttcctggggagaaggacagacgaagctgcattccagaagctgatgaacaacttggacagcaacagggacaatgaagttgacttccaggagtactgtgtcttcctgtcctgcattgccatgatgtgcaatgaattctttgagggctgcccagataaggagccccggaagaagtgaagactcctcagatgaagtgttgggccagtgggggaatcttccatgttggctgtgagcatagtgccttactctggcttcttcatacatgtgcacagtgctgagcaagtttaataaagagttttgaaact

SEQ ID NO: 1152 - DNA, 1581 bp, Rattus norvegicus
atttactccagcttggactgagctactgtctgttgctaaccagaccaaagtgagctgtgcctgtggctccggccgctgactgactgagtatagacaactgtcaccatgccccactcatacccagccctttctgctgagcagaagaaggagttgtcggatattgctctgaggattgtggccccaggcaagggcattctggctgcagatgagtccgtgggcagcatggccaaaaggctgagccaaattggggtagagaacactgaggagaatcgccgactgtaccgccaggtcctgttcagtgctgatgaccgtgtgaaaaagtgcattgggggggtcatcttcttccacgagacactctaccagaaagatgacaatggtgtcccctttgtccgcaccatccaggagaagggcattctcgtaggcatcaaggttgacaagggtgtagtgcctctagctgggactgatggagaaaccaccactcaagggctggatggactcttggaacgctgtgctcagtataagaaggacggtgctgattttgccaaatggcgctgtgtgctgaaaatcagtgatcgcacaccctcggcactggccatactggagaatgccaatgtgctggcccgctatgccagcatctgccagcagaatggtatcgtgcccatcgtggagcctgagatcctgcctgatggagaccatgacctcaaacgttgccagtttgttacagagaaggtcctggctgctgtgtacaaggccttgagtgatcatcacgtatacctggaagggactctcctcaagcccaacatggtgacccctggccatgcctgtcccatcaaatatagcccagaagagatcgccatggcaactgtcactgccctgcgtcgaactgtgcccccagctgtcccaggggtgactttcctgtctgggggtcagagtgaagaggaggcatcactcaacctcaatgccatcaaccgatgctcacttccccggccctgggccctcaccttctcctacggacgtgccctgcaggcatctgcactcagtgcctggagaggacaaagggataatgctggggctgctactgaggagtttatcaagcgggccgagatgaacgggcttgcagcccagggcaaatatgaaggcagtggagatggtggagcagcagcacagtccctctacgtggccaaccatgcctactgaggcacgcttacacgacctgtagcccttggcctagcaatgcacatcccattttgcctatagtcacagccagggccaaatagccgtgctgaacagagatatcttcatccagcaccaagtcatctcgcatcccacaatgcctcacattgctgcactggagaccacaggatgggagggtagagaggcccgtccatgtctgaggatggagaaactatttagaagtcagaacagaacctttcccctgtctccaccagtccttacagtgtcccttgatggtgtagtttgtccttgggctctgcttgctgaccttctctcttgggatcgggatgtgaaccctggcccagactcacgctctgagtacatagtgaataaacgggagcaaaacac

SEQ ID NO: 1153 - DNA, 2061 bp, Rattus norvegicus
tggctgcaccatgagcgtctctgcactgagctccacccgcttcacgggcagcatctctggcttcctccaagtggcctccgtgcttggtctgcttctgctgctggtcaaagcagtccagttctacctgcaaaggcaatggctactcaaggctttccagcagttcccatcacctcccttccactggttctttgggcacaagcagtttcaaggtgacaaagaactacagcaaattatgacatgtgtggagaatttcccaagtgcctttcctcgatggttctggggaagcaaagcctacttaattgtctatgaccctgactacatgaaggtgattctcgggcgatcagatccaaaggccaatggcgtctacagattgctagctccttggatcggatatggtttgctcttgctgaatggacaaccgtggttccagcaccggcgaatgctaaccccagccttccactatgacattctgaaaccctatgtaaaaaacatggctgactccattcgactgatgctagacaaatgggaacagctggcaggtcaagactcctctatagaaatctttcaacatatctccttaatgaccctagacactgtcatgaagtgtgccttcagccacaatggcagtgttcaggtggatggaaattacaagagctatatccaggccattgggaacttgaatgacctctttcactcccgtgtgaggaacatctttcatcagaatgataccatctataatttttcttccaatggccacttgttcaaccgtgcttgtcaacttgcccatgatcacacagatggtgtgatcaagctaaggaaggatcagctgcagaatgcgggagagctggaaaaggtcaagaagaaaagacgtttggattttctggacatcctcttacttgccagaatggagaatggggacagcttgtctgacaaggacctacgtgctgaggtggacacatttatgttcgagggtcatgacaccacagccagtggagtctcctggatcttctatgctctggccacacaccctaagcaccaacaaagatgcagagaggaagttcagagtgtcctgggggatgggtcctccattacctgggatcacctggaccagattccctacaccaccatgtgtatcaaggaggccctgaggctttacccacctgttccaggcattgtcagagaactcagcacatctgtcaccttccctgatgggcgctctttacccaagggtatccaagtcacactctccatttatggtctccaccacaacccgaaggtgtggccaaacccagaggtgtttgacccttccaggtttgcaccagactctccccgacacagccactcattcctgcccttctcaggaggagcgaggaactgcattgggaaacaatttgctatgagtgagatgaaggtgattgtggccctgaccctgctccgctttgagctactgccagatcccaccaaggtccccatccccttaccacgacttgtgctgaagtccaaaaatgggatctacctgtatctcaagaagctccactaattccgttgtggagctccgaaatctgaaatgagtttcactggcagaaagctgagttggtggtgtgactagccttcttcagaagagtgcttcagagagtcctctcctcctctcttcagtacagatcacccttctcagcactggaatattcctctgctttaaagccagcacccttcccataccccctcttctaaaagccttcccttttacaaatgttcttatgacatcatcaagaccactgaaaaactccaagataatttcccatctcaatattccttactccatctaacctactaagtcccttttgaattatgaggaataattcaatttgttccatgggctccaaaactcaaggcctgagcattattgtgaaacctttattcagcctaatatcatcttcacaagactgttacctggtacgttcatctaaatctcccctgcatagtctctctacctgactattcctcacacaagtttctttaccttccctcctttctccaataaagtgtccagtgtcctgcaca

SEQ ID NO: 1154 - DNA, 1840 bp, Rattus norvegicus
gccgactgggagcgaccgagcgggccaccgctgccgccatgaaccccgaatatgactacctgtttaagctgcttttgattggtgactcgggcgtgggcaagtcatgcctgcttctgcggtttgctgatgacacgtacacagagagctacatcagcaccattggggtggacttcaagattcgaaccattgaactggatggcaaaaccatcaaactacagatttgggacacagctggtcaggaacggttcaggaccatcacttccagctactatcggggtgctcatggcatcattgtggtgtatgacgtcactgaccaggaatcctacgctaatgtgaaacagtggctgcaggaaatagatcgctacgccagtgagaatgtcaataaactgctggtaggcaacaagagtgacctcaccaccaagaaggtcgtggacaataccacagccaaggaatttgcagactctctgggtgtccccttcctggagacaagtgccaagaatgccaccaatgttgaacaggcattcatgacaatggctgcagagatcaaaaaacggatggggccaggagcagcatctgggggtgaacggcccaacctgaagatcgacagcactcctgtgaaatctgctagtggtggctgctgctagggggggggggggtacttgggggaggggcaccttctccagatgatgcccctggagggggcaggaagtgcctccctctcctagggcatttgagtctgtagctttggggtgtcctgggctccccatcttcctctggcccatctgccttctgctctgagtcccagtcctgtcagggcccccatggaggacatgcagaacctgtggctggggtggtcacagggactgctctgctgctgcctctaggtaccttgaaaagatgcccaccacgcacctttctctgtaatgagggctccgctgtctgtcactcacccccatgtatgctgcactgggtttctcttttcccttcttcccaatagcgagggcctccctgcctctgctgcccctgggtgcaggcagtagccagggatccagggccttagatccagggtcctacatcggacctcaggacaggtgacagggctgcaagagcccaatagtcaccttttcctcatctctgcctcactccacgctcccacacacggcttgagccgtccagctgcggttaggtcttgagcacatctagggtaggtgggcggatggctgtgctgggcctatgtctcaagccagagggagcctgctcctgcctccccctgccctgccagagccaggcccgagtgctgcctgcccaccgagcccctttgtccctgaggaaagcggaggcggaaggcccaccttgccaaaggccgggcaccagccttaaccctcactctgccagcaccacctcccttttcccaggcagcacatctggcttgttcttcctccattcctcagagcctgacagggccaaacctacttctctggggaatgtgggtgcaatttggggttgtggggctcttcccccctcccaactcagaatcctggccccaccctctggcacagcttcctgtagaaagcctttggtctttacctaagaagccatgtcctttgtgctgtctcttgccagtctcgccctacaacctgtcctcccctccagtgtgtatttaagtccctgggctgcccctctgggagggagcctcttctcccaggttcccctctggtgtcatgtcaggcattttgcaaggaaaagccacttgggagaagatggaaaaggatgaaaaaataaatttccactggcccttgaataagccaagggtttttgcaaggaaaaaaaaaaaaaaaaa

SEQ ID NO: 1155 - DNA, 3513 bp, Rattus norvegicus
gtgcagccaccctcgcctgcctcgctcttccttccttcgctcgcaccatggctgatcagctgactgaagaacagattgctgaattcaaggaagctttctccctatttgataaagatggggacggcaccatcacaacaaaggagctggggactgtcatgcggtcactgggtcagaacccaacagaggctgaactgcaggatatgatcaacgaggtggatgccgacgggaatggcaccattgacttcccagagttcttgactatgatggctagaaaaatgaaagacacagatagcgaagaagaaatccgtgaggcattccgagtctttgacaaggatggcaatggctacatcagtgcggcagaactgcgccacgtcatgacaaacctcggggaaaagctaacagatgaagaagtagacgaaatgatcagagaagcagatattgatggagacggacaggtcaactatgaagaattcgtacagatgatgactgcaaaatgaagacctactttcaactactttccccctctagaagaatcaaattgaaatcttttacttacctcttacaaaaaaaaaaaagaaaaaagaaaaaagttcatttcttcattctgtttgtatctagcaaaactgaatgtcaaaagtaccttctgtccacacacaaaatctgcatgtattggttggtggtcctgccccctaaagatcaagccccctacatgagttttacagtataaatactcgtactaccttataaggaagcacttagtggactccttcaagttccatttgctaatgattaacacactgtctgggctggccagtttctcatgcatgcagcttggtgattgagcacagtcaggcctttgtattaaaactgaaaaatggaaaaaacaaattcaaactctcagatggcttctagttcaatctgttcagataaatgtcagcagccagtttaccgcaaacaaacatttaaaattggtttacctcaggatgatgtgcaggaaacgggtgaaggctaaactttgagacacagccctagatgtaggacagtcctcttcaagtgccccaatcccatggtgacagtgacaccctggtggcgagcccgagtgtgatggttcaccgctgtgcacattgcattggagtgaagtgaacaaggctgtcaccaaatcacacacgttttaataagaaatgtttactaagggagcatctttggactctctgttttaaaaccttgtgaaccatgactcggagccagcagagtaggctgtgtctgtggacttgagcacaccatcaacattgctgttcaggaaattataatttacgtccattccaagttgtaaatgctagtcttttattttttttttccaataaaaagaccattaacttaaaagtggtgttaaatggtttgtaaagctgagcttggaagggggacaaggccgttggaggggaggtcagcggacatagaaacacccaacgtccagtacaagctggatttcccgcccaggttctctagcatcaacccctgaaaccagacagattctttgtcatctacgaccatgtaagtctagttattcaaatctgcgcgcatgcgcaaatcatggtgaattgatacttggagtagagccctagtgaaggaaggcctcaagcattcagtaaggatgtcttggctgtgctgctgctgacctgttgaagtacatgaggccatctgtgcaggagacatgatttagtgtgtgtgtaatcctatactcactgtgtatggtgaagcaggccagtcaaagacactacctttgattcagtttaatttatggttatacttaactttagccttttttattatttaagttcactgctttttctccccctaagtagagttaatgcttaacactgtcttgaaagcaaaacaatatcccagaatgaattttgtgtcttaattacgaacctgtaaccaaaacgtacatgtgctggtactggtcccttagcccaaggcactgggctatttaaaaagtcccccttaagaagtgtgttgcatttaaaacaagggccttgtacatttttcagggtgttaactggctgtatctgattaataaggagtgttggcttccaaattcgggggtggcagggagctggcaggcttgtagcaaggcaatgagaagcccttggcaaccacacgggtgcactcggggtaacctacagacccctggttgctccttctcctgctccctgtctttctggcgttttgtagctccttagaattttttttctttctgccaggaggataggtcagagcagtagagaggaagacattgcctgagcgcttctgctcatctttggactgggtggttggcagacaggtcgatgggtggtaaattgacttcagtatcggactcagtaggtattcccttttggtagagaggactgagggctccaggtgtgaagtgaatggccgtggatatgttgtgtaagaggattaagtcgcccagtcgatgacccagtctcaggcttgtggtctgttacctcttggtagtttcaaagggggtcggaggtggctttttaaaaacaatttaccccctatctttaaccatttaccaagtctgtagaagctgggtagacaatattttagcagctccgtagcctgtcctaaaaggttaccttctaaacaggattcttgtgtggccagggatcctgcatgggaactggaaacccctaacccccggggggtgggaagcaggagtttggaactgtaggaggcagagtccccccacctcctcagccttctggcatccaggggcacaagcagcccagggcttggtgttggcagtctgagttcgtgaggtagaaagagtggggtgtcaaggcagtacccctgaagttggatagtactttcctgtaaactgtccctcacttataactactctataaatatatgcatatatttatataaatatatatatataagtgactggttagctggcatcctgctttagcctgagacttgccctaagaaactgctgagcccttggtaaacgtctacacagtaagtttttctgtctgttggggggagctgttgaacaaggcagacatcttgatagttcagatgggctttaatgtactgttgccagggaaggctttttctggttttttgacaaatttttagcacacttcaattggtgtctcgagcaactttaacacattgaagatgaggtattgtacatatttttatattctctttataagtgcatgtctccaacttgtaaccaatattgtacggaatggctgtccagtaggcctagtgtttctgtcacacgagagggatagcatgtaccattcacccctcagcatcctgggagcttcttcttgaatgaagactgtaaatttggtcaagtcaactcttagttcggtttccttaccatttgaatgattgactgtgtgtcctgcgtgtatttctcttttggcagcgaccagagttacactgatgtgtctcaaccgacccactcggctggcaaccacctatttattttct

SEQ ID NO: 1156 - DNA, 16300 bp, Rattus norvegicus
gttaatgtagcttataataaagcaaagcactgaaaatgcttagatggattcaaaaatcccataaacacaaaggtttggtcctggccttataattaattggaggtaagattacacatgcaaacatccataaaccggtgtaaaatcccttaaagatttgcctaaaacttaaggagagggcatcaagcacataatatagctcaagacgccttgcctagccacacccccacgggactcagcagtgataaatattaagcaatgaacgaaagtttgactaagctagtacctctcagggttggtaaatttcgtgccagccaccgcggtcatacgattaacccaaactaattattttcggcgtaaaacgtgccaactataaatctcataatagaattaaaatccaacttatatgtgaaaattcattgttaggacctaagcccaataacgaaagtaattctaatcatttatataatgcacgatagctaagacccaaactgggattagataccccactatgcttagccctaaaccttaataattaaacctacaaaattatttgccagagaactactagctacagcttaaaactcaaaggacttggcggtactttatatccatctagaggagcctgttctataatcgataaaccccgttctaccttaccccttctcgctaattcagcctatataccgccatcttcagcaaaccctaaaaaggcactaaagtaagcacaagaacaaacataaaaacgttaggtcaaggtgtagccaatgaagcggaaagaaatgggctacattttcttttcccagagaacattacgaaacctttatgaaactaaaggacaaaggaggatttagtagtaaattaagaatagagagcttaattgaatagagcaatgaagtacgcacacaccgcccgtcaccctcctcaaattagattgacattcacatatacataatttcactaacaaatttatgagaggagataagtcgtaacaaggtaagcatactggaaagtgtgcttggaataatcacagtgtagcttaatcacaaagcatctggcctacacccagaagaattcataaaaaatgaacactttgaactaaccctagccctacaaccaaccaacataactaaacccccacataaactaaaacatttaactcaaaaagtattggagaaagaaatttacttaccaagagctatagagaaagtaccgcaagggaaatgatgaaagactaatttaaagtaaaaacaagacaaagattaaacctgtaccttttgcataatgaattaactagaaaatccttaacaaaaagaatttaagctaagaaccccgaaaccaaacgagctacctaaaaacaatttcatgaatcaacccgtctatgtagcaaaatagtgggaagatttttaggtagaggtgaaaagcctatcgagcttggtgatagctggttgcccaaaaaagaatttcagttcaaactttaagcttccatcagaacaacaaatcaaaatgtaaacttaaaatatagccaaaagagggacagctctttaggaaacggaaaaaaccttaaatagtgaataaacaactacaatcacttaaccattgtaggcttaaaagcaagccatcaataaagaaagcgtcaagccacatcatcttacacacacactaattccacaaacctcaaaaattccaaaattacaaattgggctaaatctatgatcctagtgaatactgttaatatgtgaacaagaaccaatccaccaagcacaagtgctaagacaaccggataaccattgttaattattgaatcataggcataacccaacaatagaattacctatccctaactcgttagcccaacacaggcgtgctttaaggaaagtttaaaaaagtaaaggaactcggcaaacacgaaccccgcctgtttaccaaaaacatctcctctagcataacaagtattagtggcatcgcctgcccagtgactaaagttccacggccgcggtatcccgaccgtgcaaaggtaggataatcacttgttccttaattagggactagaatgaatggctaaacgagggtccaaccgtctcttacttgcaatcagtgaaattgaccttccagtgaaggggcggactcataataaaagacgagaagaccctatggagctttaatttactaatttcaatttatataaaaaaacctaatgggcgaaaacaacaaaattatgaactaccaaatttcggttggggtgacctcggagaataaaaaatcctccgaatgattataaccgagtcggtaaccgtgtccgacccagtcaagtaatactaatatcttattgacccaattattgatcaacggaccaagttaccctagggtaacagcgcgacctatttaagagttcatatcgacaattagggtttacgacctcgatgttggatcaggacatcccaatggtgcagaagctattaatggttcgtttgttcaacgattaaagtcctacgtgatctaagtccggcaatccaggtcggtttctatctatttacaatttctcccagttacgaaaggacaagagaaatggagaccaaccaatcctaggcttccaaccaatttagaaaaacttaataaagtatatatgtacaataaataaccttagacccaagttattagggtggcagagccaagtaattgcgtaagacttaaaaccttgttcccagaggttcaaatcctctccctaatagtgtactttattaatatcctaacactcctaatcccaatcttaattgccataggccttctcaccctagtagaacggaaaatcctaggctacatacaattacgcaaaggccccaacaacgaaggcccatatggtaaactacaaccatttgcagatgccataaaactattcataaaagaacccatacgccctctaaccacctcaatatcactatttattatcgccccaaccctctcccttacactagctctaagcctatgaattcccttaccaataccccacccccttatcaacctcaacctaggcataccatttattctagccacatccagcctttcggtctactccattctatgatcgggatgagcctcaaattcaaaatactccctattcggagccctacgagccgttgcccaaaccatctcttacgaagtcacaatagccttatacctcttatccgtcctcctaataagcggctccttctccctacaaatacttatcactacacaagaacatatctgactattaatccccgcctgaccaatagccataatatgatacatttcaaccctcgcagaaacaaatcgagctcccttcgacttaacagaaggagaatcagaattagtctcaggctttaacgtcgaatacgccgcaggaccattcgccctattcttcatagccgagtacaccaacattattctaataaacgccctaacatcaattgtattcctaggccccttatatcatatcaattaccctgaattatactcaaccagcttcataacagaaacactacttctatccacaactttcctatggattcgagcatcctacccccgttttcgatatgaccaactaatgcacctcctatgaaaaaatttcctcccactaacactagcattctgcatatgatacatttccctgccaattttcctagcaggaattccaccctacacatagaaatatgtctgacaaaagagttactttgatagagtaaataatagaggtttaaatcctcttatttctaggacaataggaattgaacctacacctaagaattcaaaattctccgtgccaccaatacaccctatcctacatagtaaggtcagctaactaagctatcgggcccataccccgaaaatgttggttaaacccttcccgtactaataaatccaattaccctaaccattatttacttaaccacctttaaaggccgcctaatcacgacacttagcaccaacttaccaccaatatgagtaggattggaaataagccttttagctatcatcccacttctagccaacaaaaaaagcccacgatcaactgaagcagcaacaaaatattttctaacccaagctacagcctcaataattatcctactagtcatcatcctcaactacaaacaatcaggaatatgaacccttcaacaacaaaccaataacatactactcaacataatactcatttcactggccataaaacttggactagccccattccactactgactacccgaagtcacccaaggaattcccctacacattggattaatcttactaacatgacaaaaaattgctccactatcaattctataccaattttatcaactcctaaacccaactatcaccaccattctcgcaatttcatcagtctttgttggcgcctgaggaggacttaaccagacccaaacacgaaaaatcatagcatactcatcaattgcccacataggatgaataacagcaatccttccatacaaccctaacttaaccctcctaaacttaacaatttacatcctacttactgttccaatattcaattacatcataacaaactcagcaacaacaatcaacacactctcactcgcatgaaataaaactcccataatcctaaccatagcatccatcatcctcctatcactaggaggactcccccctctcacaggatttttaccaaaatgagcaattatctccgagcttctaaaaaacaactgctcaaccctatcaacactaatagctatcatagccctattaagcctattcttctatactcgactaatttactctatatccctcaccacattcccaaccaacaacaactccaaaataatctcccaccaccaaaacccaaaacataattttatcctcccaaccctcacagtattaagtaccctaaccctaccgctttcctcccaactaatcacatagaagtttaggatatacagttcaagagccttcaaagcccttagaaaacaaacaagtttaacttctgataaggactgtaagactatatcttacatctgttaaatgcaaatcaactgctttaattaagctaaatcctcaactagattggaaggaatcaaattcctacgaaaatttagttaacagctaaataccctacttactggcttcaatctacttctcccgcctatcagaaaagaggcgggagaagccttagtagaggagattctctacaccttcgaacttgcaattcgacatgataatcaccttaaggctttttggtaaaaagggggctcaacccctgtctttagatttacagtctaatgcttactcagccattttacctatgttcgtaaaccgttgactcttttcaactaaccacaaagatatcggaaccctctacctattatttggagcctgagcaggaatagtagggacagctttgagtattctaattcgagctgaactaggacagccaggcgcactcctaggagatgaccaaatctataatgtcatcgtcacagcccatgcattcgtaataattttctttatagtaatacctataataattggaggcttcggaaactgacttgtaccactaataattggagcccctgatatagcattcccacgaataaataacataagcttttgactgcttcctccatcatttctactccttttagcatcctccatagtagaagctggagctggaacaggatgaacagtatatccccccttagccggaaacctagcccatgctggggtatccgtagatttaactattttttccctccacctagccggggtgtcttctatcttaggagctatcaactttatcaccactatcattaatataaaaccccctgctataacccaatatcagacacctctctttgtatgatccgtactaattacagccgtcctactacttctctcactgccagtattagcagcaggtatcactatactccttacagaccgaaatctaaatactactttcttcgaccccgctggaggtggagacccaattctttatcaacacctattctgattcttcggccacccagaagtgtacatcttaattcttccagggtttggaattatttcacatgtagttacctattactctggaaaaaaagaacccttcggatatataggtatggtatgaaccataatatctattggcttcctaggatttattgtatgagcacatcacatattcacagtaggcctagatgtagacacccgagcctactttacatctgccactataattatcgcaattcctacaggcgtaaaagtattcagctgactcgctacactacatggaggaaatatcaaatgatcccccgccatattatgagccttagggtttatcttcttattcacagtagggggcctaacagggatcgtactatctaactcatcccttgacattgtacttcatgatacatactacgtagtagctcacttccactatgtcttatctataggagcagtattcgccatcatagctggcttcgtccactgattcccactattctcaggctataccctaaatgacacatgagcaaaagcccactttgccattatatttgtaggtgtaaacataacattttttcctcaacacttcctaggattagcagggatacctcgtcgttactctgattatccagatgcttataccacatgaaatacagtctcctctataggctcattcatctcacttacggccgtccttgtaatgatcttcatgatttgagaagccttcgcatcaaaacgagaagtgctctcaatttcctactcttcaactaacctagaatgactgcatggatgccccccaccttaccacacattcgaagaaccttcctatgtaaaagttaaataagaaaggaaggaatcgaccccctacaactggtttcaagccaatttcataaccattatgtctttctcaatgagatattagtaaaataattacataaccttgtcaaggttaagttatagacctaatcctatatatcttacatggcttacccatttcaacttggcttacaagacgctacatcacctatcatagaagaacttacaaactttcatgaccacaccctaataattgtattcctcatcagctccctagtactttatattatttcactaatactaacaacaaaactaacacacacaagcacaatagacgcccaagaagtagaaacaatttgaacaattctcccagctgtcattcttattctaattgcccttccctccctacgaattctatacataatagacgagattaataacccagttctaacagtaaaaactataggacaccaatgatactgaagctatgaatatactgactatgaagacctatgctttgactcctacataatcccaaccaatgacctaaaaccaggtgaacttcgtctattagaagttgataatcgggtagtcttaccaatagaacttccaattcgtatactaatctcatccgaagacgtcctgcactcatgagccatcccttcactagggttaaaaaccgacgcaatccccggccgcctaaaccaagctacagtcacatcaaaccgaccaggtctattctatggccaatgctctgaaatttgcggctcaaatcacagcttcatacccattgtactagaaatagtgcctctaaaatatttcgaaaactgatcagcttctataatttaaactcattgcgaagcttagagcgttaaccttttaagttaaagttagagacaacaaatctccacaatgacatgccacaactagacacatccacatgatttattacaatcatctcctcaatagccacactatttattttatttcaattaaaaatttcttcccaaacctttcctgcacctccctcacccaaaactatagccacagaaaaaacgaataacccttgagaatcaaaatgaacgaaaatctatttgcctctttcattacccccacaataataggtctaccaattgttgtgaccattattatgttcccatcaattctattcccatcatcagaacgcctaatcagcaaccgactacactcatttcaacactgactaatcaaacttatcatcaaacaaataatgttaattcacacaccaaaaggacgaacctgagccctaataattgtatccctaattatatttattggctcaaccaaccttctagggcttcttccccatacatttacccctaccactcagctatctatagacctaagcatagccatccccctatgagcaggagccgtaattctaggtttccgacacaaactaaaaaattctttagcccacttctcaccgcaaggaacccccatctcactaattcccatactaatcatcatcgaaactatcagcctatttattcaaccgatagcactagcagtacgactaacagcaaacattacagcaggccatctattaatgcatctaatcggaggagctaccctagtacttatagacatcagcccaccaaccgctacaattacatttattattctacttctacttacagtacttgaatttgccgtagccttaattcaagcctatgtattcacccttctagtcagcctgtacctacatgataacacataatgacccaccaaacccatgcataccatatagtaaacccaagcccatgaccactaacaggagccctatcagctcttctactcacatccggcttagtaatatgattccattacaactccacaattctcctatcattaggcctcctgacaaacatcctaactatatatcaatgatgacgagatatcatccgtgaaggaacataccaaggccaccacacccctattgtacaaaaaggcctccgatacggaataatcctgtttattgtctccgaagtattcttctttgccggatttttctgagcattttatcattccagcctagttcctacccacgacctaggcggttgctgacccccaacaggaatcacccctttaaatcccctagaagtaccccttctaaatacatcagtcctcttagcatcaggagtctcaattacatgagcccatcacagcctaatagaaggcaaccgaaaccatataaaccaagccctactaatcaccattctcttaggattatatttcactatcttacaagcctcagagtatttcgaaacatcattttctatctcagacggaatttacggctcaacattcttcatagcaacgggatttcatggcctccacgtaattattggctcaactttcctaattgtctgtctactacgacaactaaaattccacttcacatcaaaacatcatttcggatttgaagccgcagcatgatactgacacttcgtagatgtagtttgactattcctatacgtttctatctattgatgaggatcctactcccttagtataaacaatacaactgacttccaatcagttaattctgaaaaaactcagaagagagtaattaacctacccattatcatcacaattaacatcaccttatcctttatcctcatttcaattgcattctgattgcctcaaataaacttatactccgaaaaagcaaacccatatgaatgtggcttcgacccaacaagttctgcacgccttcctttttcaataaaatttttcttagtagccattacatttctactattcgacctagaaatcgccttactacttcccctcccatgagcgattcaaacaaccaataccactacaataatagcaactgcctttattttagtcactattttgtctcttggcctagcctacgaatgaacacaaaaaggactagaatgaacagaataattggtaattagtttaaataaaattaatgatttcgactcattagattatgataataatcataattaccaacaatgacatctgctttcctaaatttaactatagcctttacattatctctactaggtacttttatatttcgctcccacctaatatccactctcctctgcctagaaggaataatactatcactatttgtcataacttcaacatccacattaaactccaactccataatctccataaccatcccaattaccattctagtttttgcagcctgcgaagcagcagtaggtttagccttactagtaaaaatttcaaatacttacggaacagactacgtacaaaacctcaaccttctacaatgttaaaaattattttcccatctatcatactcctcccactaacatgactctcagccaacaaaaaaatctgaaccaatgtcacctcctacagctttctagtgagcctattaagcttatcactcctatgacaaaatgacgaaaattacctaaatttctcagttatattctcctccgatccattatccaccccactaatcattctaacaacttgactcctcccactaataatgctcgctagccaaaatcacataaaaaaagaaaatataatgcatcaaaaactttacatctcaatacttattagcctccaaattttactcatcataacattctccgcaacagaactaattttattttatatcctgttcgaggccactctaatcccaacactaattatcattacacgatgaggcaaccaaacagaacgcttaaatgcaggaatttatttcctgttttatacactaattggctccatcccactcttaattgccctcatttcaatccaaaactcaataggaacactcaacttcctaatcctttccctcacaacacaccccctaccctcaacatgatccaacaccattctatgactagcatgtataatagcatttataatcaaaataccattatacggagtccatctatgattaccaaaagcccacgtagaagctccaattgcaggctctataattttagcagcaattctcctaaagctagggggttatgggataatacgagtttccatcattctagaccccctaacaaaatctttagcctacccattcatcatcctctcattatgaggcataattataactagctcaatctgcctacgccaaacagatctaaaatcattaattgcttactcatcagtaagccatatagccctagtcatcacagccattataatccagacaccatgaagcttcatgggagccacaatactaataatcgcccacggcttaacctcatcactcttattctgcctagcaaacaccaactacgaacgaattcacagccgaactataattatagctcgaggattacaaataatctttccattgatagcaacatgatgactattagcaagcttagccaacctagcactaccacccctaattaacctcataggcgagttattcattgttatagcaacattttcctgatcgaacccctctatcatccttatagcaactaacattgtcatcacaggaatatactcaatatatatgattatcacaacccaacgaggaaaactaaccagccacataaacaacctccaaccttcccacacacgagaattaacactcatagctctacacattattcccctcatactattaacaatcaaccctaaactcatcacaggcctaacaatatgtagatatagtttacaaaaaacattagactgtgaatctaacaacaggaaatcaaattccttatttaccaagaaagtatgcaagaactgctaattcatgcacccatacctaaaacatatggctttcttacttttataggatagaagtaatccattggtcttaggaaccaaaaaccttggtgcaactccaaataaaagtaataaatataataacaatcctaatcctcataattcttgatttacttacaacaccaatcacattttcaataacaatcttaaccaaacttatgtacttccgtcatatgctcattacatcaattaaattctcattcctccttagcctcttacctttactactattcttccaccacaacacagaatacataattactaactgacattgactaactattaattctattaaacttactataagtttcaaaattgactatttctcaatcctattcctatcagtatccctattcgtaacatgatcaattatacaattctcttcatgatatatacactctgacccccacattaaccgattcattaagtacttaataatattcctgaataacatactaatcctaacctcagctaacaatctattccaactctttattggatgagaaggggtaggaattatatccttcttattaatcggatgatgatatggccttgcagacgccaacacagcggccctccaagcaatcctctacaaccgagtcggagacattggtttcatcctagctataacctgattctgcctaaacataaactcctgagaactccaacaaattttcttaaccaacaccaacaacaatctagtccctctcacaggactactaattgcagccacaggaaaatccgcccaattcggacttcatccatgactcccatcagctatagaaggcccaactcccgtctctgccctactacactcaagcacaatagttgtagcagggatcttcctaataatccgattccaccccctaacctcaaacaatagtactattataacagccatactatgtcttggtgcaatcaccacattattcacagcaatctgtgctctcacccaaaacgacatcaaaaaaatcgtagctttctcaacatccagccaactaggccttataatagtcacattagggattaaccaaccctaccttgctttcctccacatttgcacccatgcattcttcaaagccatattattcatatgctccggatcaatcatccatatcctcaacgatgaacaagacattcgaaaaataggcaatataataaaagcaataccattcacatcatcttgtctcattatcggaagcctagcccttaccggaatacctttcctcacaggattctattcaaaagatctcatcatcgaagccatcaacacgtgtaacaccaacgcctgagccctaataatcactttaatcgccacatccataactgctgtgtacagcatacggatcatctacttcgtcaccatgacaaaaccacgatactccccactaattactattaatgaaaacaacccaaacctcattaatccaatcaaacgcctagcattaggaagcatcctagcaggcttccttatctcactaaatattcctccaactaacattcaaattctcacaataccctgacatttaaaaataacagccctacttattacaatcctaggatttgccattgccctagaacttaacaatttaacactaaatctatcaataagcaaacccaccaaactatcatcattctcaacctccctaggctactacccaccaattataccccgaattattcctcaaaaaactctaaattctagctacaaattatccttaaacctactagacctaatctgatcagaaaagacaatcccaaaatcaacctcaatcacccaaacccaactatctaaaataatatccaaccaaaaaggactaatcaaactatatttcctatcatttctcatcactatttcactaatttttatcttacacacacttaatcccgagtgatttcaataataataaaaatccccgcaaacaatgaccacccagccaccactatcattcaagtagcacaactataaatagccgcaaccccaatccccccctccaacataaccccaacatcatcaatctcatacattaatcaatcgcctagactatcaaaatcaactaactccaccttattattcaaactaaacaagtagaacactaccaactccataaaaagccctaaaacaaaaaaactaaaaataaaccaattagaccctcaagtttccggatattcctcagtagccatagcagttgtatacccaaatacaaccaacatcccacccaaataaattaaaaatactattaaacctaaaaacgaacccccaaaccctaaaactattaagcacccaatacatccactaacaatcaatccaaacccaccataaataggtgaaggcttcaacgccaaccctagacaaccagtcaaaaacagtaaacttaaaataaacatataatttgtcattatttctacacagcatttaactgtgactaatgacatgaaaaatcatcgttgtaattcaactatagaaacatctaatgacaaacatccgaaaatctcaccccctattcaaaatcatcaaccactcctttatcgacctaccggccccatctaacatctcatcatgatgaaacttcggttctctactaggagtatgcctcatagtacaaatcctcacaggcttattcctagcaatacactacacgtctgataccataacagcattctcatcagtcacccacatctgccgagacgtaaactacggctgactaatccgatacctacaagccaacggcgcctcaatatttttcatctgcctattcctccatgtgggacgaggactatactatggatcctacactttcctagaaacctgaaacattgggatcatcctactatttgcagtcatagcaactgcattcatgggctatgtactcccatgaggacaaatatcattctgaggagctacagtaattacaaacctattatcagctatcccttacattgggactaccctagtcgaatgaatctgaggaggcttctcagtagacaaagcaaccctaacacgcttcttcgcattccacttcatcctcccattcattatcgccgcccttgcaattgtacatcttcttttcctccacgaaacaggatcaaataaccccacaggattaaactccgacgcagacaaaatcccattccatccatattatacaattaaagacctcctaggtgtatttatattactattattcctaataaccctagtactattcttcccagacctactaggagacccagacaattatacacccgctaaccccctcaacaccccaccccacatcaaaccagaatgatactttctctttgcctacgctattctacgctccattcccaacaaactaggaggggtcgtagccctaatcttatcaatcctaatcttagccttcctaccattcctgcatacctcaaaacaacgcagcttaacattccgcccaatcacccaaatcctttactgaatcctagtagccaacctcctagtcttaacatgaatcggaggccaaccagtagaacacccatttatcattattggtcaactagcctccatcagttatttttcaattatcctcattctcataccaatctctggaattgttgaagacaaaatgttaaaatgaaattaatgtcccgatagtataaaaattactctggtcttgtaaaccaaaaatgaagagtcagtcttctcaggacaatcaagaagaaggaactacctccccaccatcaacacccaaagctgatattctacttaaactacttcttgtcagtacataaaatgatatggacattaaaacatttatgtatatcgtacattaaattattttccccaagcatataagcatgtaatatatatctaatgatttaggacatacatttaaactcaactataaattcacaacaacatgtctattctcaaatacattaagataatgcttattagacatatctgtgttattagacatgcaccattaagtcataaacctttctcttccatatgactatccctgtccccaattggtctctatttctaccatcctccgtgaaatcaacaacccgcccactcgtccccctcttctcgctccgggcccattcgtcctgggggtgactatactgaaactttaccaggcatctggttcttacttcagggccatcaattggttcatcgtccatacgttccccttaaataagacatctcgatggtaacgggtctaatcagcccatgatcaacataactgtggtgatatacatttggtattttttaattttcggatgccttcctcaacatagccgtcaaggcatgaaggtcagcacaaagtcctgtggaaccttttagttaagggtcatttatcctcatagacaaagctcgaaagactattttattcatgtttgtaagacataaatatttataaatactgaaaaatctgtcaacaaacccccccaccccctacacctgaaacttcaatgccaaaccccaaaaacattaaagcaagaattaaataaaacaaaaagctacttaattcttaaaaggcttctccattctagtagaccacaaaattttaacttaaatcttagcattggtaaaatttcccgacacaaaatctttcctcctaactaaaccctctttacttgcctaccctcagaaaattccacatacaccaaa

SEQ ID NO: 1157 - DNA, 862 bp, Rattus norvegicus
gcactaggaacaccatgaagatcagcatcttctttgcttttctcggagctgctgttgctctccctgttaatgatgatgacaagattgttggaggctacacatgtccgaagcatttggttccttaccaggtgtctttgcatgatggcattagccaccagtgtggtggctcccttatcagtgatcagtgggtactgtctgctgctcattgctataaaaggaaactccaggttcgccttggtgaacacaatattcatgttcttgagggtggagagcaattcattgatgcagaaaagatcattcgacaccctgagtataacaaggacactctggacaatgacatcatgctgattaaattgaagtcacctgccgtccttaactcccaagtatctacggtctctctgcccagatcctgtgcatctacagatgctcagtgccttgtgtctggctggggaaacactgtgagcattggtggtaaatacccagcactccttcaatgcctggaagcccctgtcctctctgctagttcttgcaaaaaatcctacccaggccagatcaccagcaatatgttctgcctgggcttcctggagggtggaaaggactcctgtgatggtgactctggtggccctgttgtctgcaatggagagatccagggcattgtctcctggggttcagtctgtgcaatgagagggaagcctggtgtttacaccaaagtctgcaactacctgagctggattcaggagactatggcgaacaactgagttctcttacctttcgtaaatcaccggttcactatccatttccctttcttcctatacctgaaatgaggttaaaataaataattttctcctgctctaaaaaaaaa

SEQ ID NO: 1158 - DNA, 2496 bp, Rattus norvegicus
ggctcatttgcataacggccgccccttggtctccctgctgggggctggagtcccgctctcacccacctagatatctgttggaccaccggctggtcactccgaccagtcaggatgtccgcccgcggcccggctatcggcatcgacctgggcaccacttactcgtgcgtgggggtcttccaacatggcaaggtggagatcatcgccaacgaccagggtaaccggaccacccccagctacgtggccttcaccgacaccgagcgccttatcggcgacgccgccaagaaccaagtggccatgaaccccacaaacaccatcttcgacgccaagcggctgatcggacggaagttcgaagacgccacggtgcagtcggatatgaagcactggccgttcagagtggtgagcgaaggtgggaagcccaaagtgcaggtggaatataaaggggagatgaagaccttcttccctgaggagatttcttccatggtcctcactaagatgaaggagatcgccgaagcctacctggggggcaaggtgcagagcgcagtcatcactgttcctgcctatttcaacgactcgcagcgccaggccaccaaggatgcgggcaccatcaccggtctcaatgtattgcgtatcatcaacgaacccacagcagcggccatcgcttatggcctggataagaagggctgcgcgggcggcgagaagaacgtgctcatctttgacctgggcgggggcaccttcgatgtgtccatcctcaccatcgaggatggcatcttcgaggtcaagtccacggccggcgacacccacctgggtggcgaagacttcgacaaccgtatggtcagccacctggcggaggagttcaagcgcaaacacaagaaggacattgggcccaacaagcgcgctgtgcgccggctgcgcaccgcctgcgagcgcgctaagcgcaccctgagctcgtccacgcaggccagcatcgagatcgactcgctgtacgagggcgtggatttctacacgtccatcacccgcgcccgcttcgaggagctcaacgccgatctctttcgagggactctggagccggtggaaaaggcgctgcgcgatgccaagctagacaagggccagatccaggagatagtgctggtgggcggctctacccgcatccctaagatccagaagctcctgcaggatttcttcaacggcaaggagctgaacaagagcatcaatcccgacgaggcggtggcctacggcgccgctgtgcaggcggctatcctcattggcgacaagtctgagaacgtgcaggatctgctgttactcgacgtgactcccttgtcgcttggcattgaaacagctggcggtgtcatgaccccactcataaagagaaacaccaccatccctaccaagcagacgcagaccttcactacctactcagacaaccagagcagcgtgctggtgcaagtgtacgagggcgaacgggccatgaccaaggacaataacctcttgggcaagttcgacctaactgggatccctccagcaccccgcggcgtcccccagatcgaggtcacctttgacatcgatgccaacggcattcttaacgtcactgctgcagacaagagcaccggcaaagaaaataaaatcaccatcaccaacgacaagggtcgtctgagcaaagacgacattgaccggatggtgcaggaggcagacgggtacaaatcggaagatgaagctaatcgcgatcgcgtggcagccaaaaacgcggttgagtcctatacctacaacatcaagcagacggtggaagacgagaaactgaggggcaagattagcgagcaggacaaaaacaagattctcgacaagtgtcaggaggtgatcaactggcttgaccgaaaccagatggcagagaaagatgagtacgaacacaagcagaaagagcttgagagagtgtgcaaccccatcatcagcaaactttaccaaggcggtccaggcggcggcggctcctctggaggacccaccattgaggaagtggactaggcttgcgctggagtccgcgtaaacctcttttcctttctttcttttcttttctttttctttttctcccttttgttttggtttctttgaaatgtccttgtgccaagtaagatctgttgttggaagtctttagcctggtgcatacatatgaaaggaaaggtgcaacaacttagtttagttataaaaagttagttctaaagtttgatttgggggaaaaatgaggtttctctttaatgcatttagagcgattgctgatttgagcttttgttgttgttgttaagcttaagtatgtacgtggagatttgcttgaaatgagaaacctgatgtttgcacacctgtcctatggaagcttggttacactaagatacagagaagcttgaattatttttatgtactatgagatgaaagtaaacactgcggtaataaagacaggtatattctgtaaacacataaatgcacattcaaagtaaagctgaaattgatctc

SEQ ID NO: 1159 - DNA, 735 bp, Rattus norvegicus
gtcacctcgacaccagagagtccaccatggcctcagaccaccagacacaggcgggcaagccccagccccttaaccctaagatcatcatcttcgaacaggagaacttccagggccattcccatgagctcagcgggccctgccccaacctgaaggagactgggatggagaaggcaggctccgtcctggtgcaggctggaccctgggtgggctacgagcaggctaattgcaagggagagcagtttgtgtttgagaagggcgagtacccacgctgggactcctggaccagcagccggaggacggactccctcagttctctgagacccatcaaagtggacagccaggagcacaagatcatcttatatgagaaccccaactttacgggcaagaagatggagattgtcgatgatgacgtacccagctttcacgctcacggataccaagaaaaagtgtcttccgtgcgcgtgcagagcggcacgtgggttgggtatcagtaccctggctaccgtgggctgcagtatctgctggagaagggggattacaaggacaacagcgacttcggggcccctcacccccaggtgcaatctgtgcgtcgcatccgtgacatgcagtggcaccagcggggcgccttccacccctccagctaaagccctgcccctccctccttcccagggtccaggccagccaccggggtcctcctgacacccagagtgaataaagtgtggcttgcaacttgaa

SEQ ID NO: 1160 - DNA, 3418 bp, Rattus norvegicus
ggtgtgaataggtgtcaaccgcctctgtggctaccagctcgtttccagagccaaccacagatgacgtgtctccttctctccacgctgaagtgggctctccacattccacagaggtggatgactccctgtcggtgtcggtggtgcaaacaccaactactttccaggaaacagaaatgtctccgtctaaagaagagtgcccaagaccaatgtcgatttctcctcctgacttctcccctaagacagccaaatccaggacaccagttcaagatcaccgatccgaacagtcttcaatgtctattgaattcggtcaggaatcccccgagcattctcttgctatggactttagtcggcagtctccagaccaccctactgtgggtgctggtatgcttcacatcaccgaaaatgggccaactgaggtggactacagtccctccgatatccaggactctagtttgtcacataagattccgccgacagaagagccatcctacacccaggataatgatctgtccgagctcatctctgtgtctcaggtggaggcttccccatccacctcttctgctcacactccttctcagatagcctctcctcttcaggaagacactctctctgatgtcgttcctcccagagatatgtccttatatgcctcgcttgcgtctgagaaagtgcagagcctggaaggagagaaactctctccaaaatccgatatttctccgctcacccctcgagagtcctcacctacatattcacctggcttttcagattctacctctggagctaaagagagtacagcggcttaccaaacctcctcttccccaccaatagatgcagcagccgcagagccctacggcttccgctcctcaatgttatttgatacaatgcagcatcacctggccttgagtagagatttgaccacatctagtgtggagaaggacaatggagggaagacacccggtgactttaactatgcctatcaaaagcccgagagcaccaccgaatccccagatgaagaagattatgactatgaatctcacgagaaaaccatccaggcccacgatgtgggtggttactactatgagaagacagagagaaccataaaatccccatgtgacagtggatactcctatgagaccattgagaagaccaccaagaccccagaagatggtggctactcctgtgaaattaccgagaaaaccactcggacccctgaagagggcgggtactcgtatgagatcagcgagaagacaacacgaacccctgaagtaagtggctacacctatgagaagaccgagaggtccagaaggctcctcgatgacattagcaatggctacgatgacactgaggatggtggccacacacttggcgactgtagctattcctacgaaaccactgagaaaattaccagctttcctgaatctgaaagctattcctatgagacaactacaaaaacaacacggagtccagacacctctgcatactgttacgagaccatggagaagatcaccaagaccccacaggcatccacatactcctatgagacctcagaccgatgctacactccagaaaggaagtccccctcggaggcacgccaggatgttgacttgtgtctggtgtcctcctgtgaattcaagcatcccaagaccgagctctcaccttccttcattaatccaaaccctctcgagtggtttgctggggaagagcccactgaagaatctgagaagcctctcactcagtctggaggagcccccccaccttcaggaggaaaacaacagggcagacaatgcgatgaaactccacccacctcagtcagtgagtcagctccatcccagacggactctgatgttcccccagagacagaagagtgcccctccatcacagctgatgccaacattgactctgaagatgagtcagaaaccatccccacagacaaaacggttacgtacaaacacatggacccgcctccagcccccatgcaagaccgaagcccttctcctcgccaccctgatgtgtccatggtggatccagaggccttggctattgagcagaacctaggcaaggctctgaaaaaggatctgaaggagaaggccaagaccaagaaaccaggcacaaagaccaagtcctcttcacctgtcaaaaagggtgatgggaagtccaagccttcagcagcttcccccaaaccaggagccttgaaggaatcctctgacaaggtgtccagagtggcttctcccaagaagaaagagtctgtggagaaagctatgaagaccaccaccactcctgaggtcaaagccacacgaggggaagagaaggacaaggaaactaagaatgcagccaatgcttctgcatccaagtcagtgaagactgcaacagcaggaccaggaaccactaagacggccaagtcgtccaccgtgcctcccggcctccctgtgtatttggacctctgctatattcccaaccacagcaacagtaagaatgtcgatgttgagtttttcaagagagtgaggtcatcttactacgtggtgagtgggaacgaccctgccgcggaggagcccagccgggctgtcctggatgccttgttggaagggaaggctcagtggggaagcaacatgcaggtgactctgatcccaacacatgactctgaggtgatgagggagtggtaccaggagacccacgagaagcagcaagacctcaacatcatggtcctagcaagcagtagtacagtggtcatgcaagacgagtccttccctgcatgcaagatagaactgtagaaaccgcagccgaccacaccacaggatttgaactgtgtttccagaaattcctgaatttgaaactaccttttcttaaacgtccattcatctaattacgtcactgaacaaggacctgccagatgctatacagtgtcatggtgatgcaaatcactgatatttctcaatttttgccgaccgctaaggaaagtaaccatattcccacaatagatttcaagttactgcaaaattacctacccccgttcatctctgctgaaatacgtggaagccaggcactcgcacacctaactgacttctgctagggattggcatttatcttagagagagaaagagagagggaaagagagtcgtcttgcatgaccactgtactactgcttgctaggaccatgatgttgaggtcttgctgcttctcgtgggtctcctgaatcaaaaaaaaaaaaaaaattttttttttttttttaaaaacaactttccttgggggcaaattaacaagtagggtgagacactttgaatttaaaaaaaaattatttcattatttgtgtaaagttaaaagacttctaaaaatatccaaggacttaggattatgttcactgtgaaaagaacactaagaaattttctcagcaaatatgatctgagatagtcaattctaagaattc

SEQ ID NO: 1161 - DNA, 780 bp, Rattus norvegicus
gcagagacacagacagaggccagcccagaaaccagccaactctcactgaagccagatctctcttcctccaccactatgcaggtctctgtcacgcttctgggcctgttgttcacagttgctgcctgtagcatccacgtgctgtctcagccagatgcagttaatgccccactcacctgctgctactcattcactggcaagatgatcccaatgagtcggctggagaactacaagagaatcaccagcagcaggtgtcccaaagaagctgtagtatttgtcaccaagctcaagagagagatctgtgctgaccccaataaggaatgggtccagaagtacattagaaaactggaccagaaccaagtgagatcagaaactacagtcttctataaaattgcatcaaccctaaggacttcagcacctttgaatgtgaacttgacccataaatctgaagctaatgcatccactctcttttccacaaccacctcaagcacttctgtagaagtgaccagtatgacagagaactagtgtgatttggaatgtgatgccttaagtaatgttaaacttatttaacttattgatattacactattcccttccatgaatactagaaatccttaaatgcaagatgtagatccatttttttatttctctgtgaatcctggttcaacactttcaatgtatgagagatgaatgggtaaactttgtgtttgagagtccaaggtattgtttaaaatattattatggatattcctaattattaaaagaaatatattatttttgtac

SEQ ID NO: 1162 - DNA, 2065 bp, Rattus norvegicus
cgcgttcaggctgcagctggcaggcatcgcgagcccggagcacccacgagctcagtgtgcaggacgcgcccccagcacagccacctacggtctctgaatgaagcttccaggagtccgcccccggacggctgcgccccatcggaggtgcacccgctgagagcgtctgggcactgaaagccggtgcgctcacctgccggccatggagccacacgggaatgacagcgacttcttgctggcacccaatggaagccgagcgccaggccacgacatcactcaggaacgggacgaagcgtgggtggtgggcatggccatcctcatgtcggttatcgtcctggccatcgtgtttggcaacgtgctggtcatcacagccattgccaagttcgagcgactacaaaccgtcaccaactacttcataacctccttggcgtgtgctgatctagtcatgggcctagcggtggtgccttttggggccagtcatatccttatgaaaatgtggaattttggcaatttctggtgcgagttctggacttccattgatgtgttgtgcgtcacagccagcatcgagaccctgtgcgtgattgcagtggatcgctatgttgctatcacatcgcccttcaagtaccagagcctgctgaccaagaataaggcccgagtggtcatcctaatggtgtggattgtgtcgggccttacctccttcttgcctatccagatgcactggtaccgtgccacccacaagcaagccatcgactgttatgccaaggagacttgctgtgacttcttcacgaaccaggcctatgctatcgcttcctctatcgtatctttctacgtgcccctggtggtcatggtctttgtctattccagggtcttccaggtggccaaaaggcagctgcagaagatagacaaatccgagggcagatttcatgcccaaaacctcagccaggtggagcaggatgggaggagcgggcacggactccgaaggtcctccaagttctgcttgaaagagcacaaagccctcaagactttaggcatcatcatgggcaccttcaccctctgctggctgcccttcttcattgtcaatattgtccacgtcatccgggccaacctcatccctaaggaagtttacatcctccttaactggttgggctatgtcaactctgccttcaatcctcttatctactgtcggagtccagatttcaggattgccttccaggagcttctgtgccttcgccggtcttcttcgaaaacctatgggaacggctactctagcaacagcaacggtaggacagactacacaggggagcagagcgcatatcagctggggcaggagaaagaaaatgaactgctttgtgaggaagcccctggcatggaaggctttgtgaactgtcaaggtactgtgcctagccttagcattgactctcaagggaggaactgtaacacaaacgactcgccactgtagtgtaggctttctactctttaagacggcccctccctgacaggacactaaccagactattttacttgagtgtaataactttagaataaaattgtatagagattttgcagaaggggcacatccttctgccttttttattttatttttttaagctgcaagtgagagagagagggagagagagagagagagagagagagaaagagagagagagagactgtatttcagtgcttaatgttttccttgtacagttcagttcctctttgcatggaacttaaaagtttctgtctgaagtgttgttggtctgtctgtttggatggtgtttccatgtatctacctcactggtcaagtattaaggataatatatatatatattgctgctggaaattcatatgtaaaggagagagttttcttcctgtacccttggacttgaaatatcctgtgtcttggacctttctgctgtgaatgtggactctctctcactccacttattcgctcaaatggagtgttgtaggcagggatttgagggacaacatcagttgtttttctgagcaaagtctaaagtttacagtaaataaattgtttgaccatgaaaaaaaaaaaaaaaaaaaaaaa

SEQ ID NO: 1163 - DNA, 806 bp, Rattus norvegicus
ggggctctttgccccatctactgcgagaatgaagaccattctcagcaatcagactgtcgacattccagaaaatgtcgacatcactctgaaggggcgcacagtcattgtgaagggccccagaggaactctgaggagggacttcaatcacatcaatgtagagctgagtcttcttggaaagaaaaagaaaaggctccgtgttgacaagtggtggggtaacaggaaggaactggccactgtcagaaccatctgcagtcatgttcagaacatgatcaagggtgtgacactgggcttccgttacaagatgaggtctgtgtatgctcacttccctatcaacgtcgttattcaggagaatgggtctctggttgaaatccgaaatttcttgggtgaaaaatacatccggagggttcggatgaggacaggtgttgcttgttctgtctctcaagcccagaaggatgagttaatccttgaaggaaatgatattgaacttgtttcaaattcagcggctctgattcagcaagccacaacagttaaaaacagggatatcaggaagtttttggatggcatctatgtttctgagaagggaaccgtccagcagcctgacgaatgagacctcagtttcctagcttcagaaacaagatcctgataacaagtacagtttgggctctgtggaaacaataaaagacttatatattgaaaaaaaaaaaaaaaaaaaaaaaaaaaaaaaaaaaaaaaaaaaaaaaaaaaaaaaaaaaaaaaaaaaaaaaaaaaaaaaaagtaaaaaaaaaaaaaaaaaaaaaaaaaaaaaa

SEQ ID NO: 1164 - DNA, 1372 bp, Rattus norvegicus
ggacatacatcccaagggacagacaacatggcagcctgtgtgaagaccaataaatcccatgtcatcttcaagaaggtctcccgggacaagtcggtgaccatctacctggggaagagagactatatagatcacgtcagccaagtagagcctgtagatggtgttgtattggtggatcctgagctcgtgaaggggaagaaagtgtatgtcaccctgacctgcgccttccgctatggccaagaggacattgatgtgattggcctgaccttccgcagggacctgtatttctctcgggtccaggtatatcctcctgttggggccatgagtgccccaacccagctccagttgagcctgcgcaagaaactgggagataacacgtacccatttctgctcacgttccctgactacctaccctgctcagtgatgttgcagccagctccacaagatgtagggaagagctgtggggttgactttgaggttaaagcatttgccacagacatcagagatgctgaagaggacaagatccccaagaagagctctgtgcggttactgatccggaaggtgcagcatgccccacctgagatgggtccccagccctgtgctgaagcctcctggcagttcttcatgtctgacaagcccctgcacctctcagtctccctcagcaaagagatatattttcatggggagcccatccctgtgaccgtgactgtgaccaataacacggagaaggttgtgaagaagattaaagtgtcagtggaacaaatagccaatgtggttctctactcgagtgattattacgtcaagcctgtggcctcggaggaaacacaggaaaaagtgcagccaaacagcactttgaccaagacgctggtgctggtgcccctcctggctaacaacagagaaagaagaggcatcgcgctggatgggaagataaagcatgaggacacaaacctggcctccagcaccattatcaaggagggcatcgatcggaccgtcatgggcatcctggtgtcataccatatcaaggtgaagctcacggtgtcaggctttctaggagagctcacatccagtgaagtggctactgaggtgccgttccgtctgatgcacccccagcctgaggacccagcaaaagaaagtgtccaggatgaaaatctggtttttgaagagtttgctcgacaaaatctgaaagatactggagagaatacagaagggaagaaagatgaggatgcaggccaggatgagtgaagacttagccttgatcggtaggaaactgcttgtagtcctggttgccttgtgggaaacccctggtaacctttcagagttatgctaaatacgaaagctcgagcattctcccagaaataaagtctgctcgtctctt

SEQ ID NO: 1165 - DNA, 1525 bp, Rattus norvegicus
ggccaagagaacgaagtcttttttttttttttcttgcgggagaacttaatgctgcatttattattaacctagtaccctaacataaaacaaaaggaagaaaaggattaaggaaggaaaaggtgaatcgagaagagccatcatgtcggggcgaccgagaaccacctcctttgcggagagctgcaagccagtgcagcagccttcagcttttggtagcatgaaagttagcagagataaagatggcagcaaggtaaccacagtggtggcaactcctggacagggtcctgacaggccacaggaagtcagttacacagacactaaagtcattggaaatgggtcatttggtgtggtatatcaagccaaactttgtgactcaggagaactggtggccatcaagaaagttcttcaggacaagcgatttaagaaccgagagctccagatcatgagaaagctagatcactgtaacatagtccgattgcggtatttcttctactcgagtggcgagaagaaagatgaggtctaccttaacctggtgctggactatgttccggaaacagtgtacagagtcgccagacactatagtcgagccaagcagacactccctgtgatctatgtcaagttgtatatgtaccagctgttcagaagtctagcctatatccattcctttgggatctgccatcgagacattaaaccacagaacctcttgctggatcctgatacagctgtattaaaactctgcgactttggaagtgcaaagcagctggtccgaggagagcccaatgtttcatatatctgttctcggtactacagggcaccagagctgatctttggagccaccgattacacgtctagtatagatgtatggtctgcaggctgtgtgttggctgaattgttgctaggacaaccaatatttcctggggacagtggtgtggatcagttggtggaaataataaaggtcctaggaacaccaacaagggagcaaattagagaaatgaacccaaattatacagaattcaaattcccccaaatcaaggcacatccttggacgaaggtctttcggccccgaactccaccagaggcaatcgcactgtgtagccgtctcctggagtacacgccgaccgcccggctaacaccactggaagcttgtgcacattcattttttgatgaattacgggacccaaatgtcaaactaccaaatgggcgagacacacctgccctcttcaactttaccactcaagaactgtcaagtaacccacctctggccaccatccttatccctcctcacgctcggattcaggcagctgcttcaccgcctgcaaacgccacagcagcctcagatactaatgctggagaccgtggacagaccaataacgccgcttctgcatcagcctccaactctacctgaacagccccaagtagccagctgcgcagggaagaccagcacttacttgagtgccactcagcaacactggtcacgtttggaaagaaaattaaaaagaggaaaacaaaaacaaaaacaaaaaacccc

SEQ ID NO: 1166 - DNA, 664 bp, Rattus norvegicus
ctttcggttcggaggaggcaacggtgcaactttcttcggtcgtcccgaatccgggttcatccgacaccagccacctccaccatgccgcccaagttcgaccccaacgagatcaaagtcgtgtacttgaggtgcaccggaggcgaggtcggcgccacatccgccttggcccctaagatcggtcctctgggtctgtctcccaaaaaagttggtgatgacatcgccaaggctaccggtgactggaaaggcctcaggattacagtgaaactgaccatccagaacagacaggcccagattgaggtggtgccctctgcctctgccctgatcatcaaagccctcaaggagccaccaagagacaggaagaagcagaaaaacattaaacacaatggaaacatcacttttgatgagattgtcaacattgcccggcagatgagacaccggtctttggccagagaactttctggaactatcaaggagatcctgggtactgcacagtctgtgggctgcaatgtggacggccgccaccctcatgacatcatagatgacatcaacagtggtgcggtggagtgcccagctagttaagaagcaacgagaaggggttgggaatttagctcagtggtagagcgcttgccaagcccaaggccctgggttcagtccccagctccgg

SEQ ID NO: 1167 - DNA, 3109 bp, Rattus norvegicus
tccagcccgccgccgagccgctcccgggtcgcaaagatgccggccgtatccaagggggaggggatgcgaggcctagcggtcttcatctccgatatccgtaactgtaaaagtaaagaagctgaaataaagaggataaataaggagctggcaaatattagatcaaaatttaaaggtgacaaggctcttgatggctacagtaagaagaagtatgtctgcaagttactcttcatctttctccttggtcatgacattgacttcggacacatggaagctgtgaatcttctgagctcaaacagatacacggaaaagcagatcggctaccttttcatctctgtattggtgaattcaaatagtgaactgatccggttgattaacaatgccatcaagaatgacctggccagccgcaatcctacatttatgggtctggccctgcactgcatcgccaatgtaggtagccgtgagatggcagaggccttcgctggagagatccccaagatcctggtggcaggagataccatggacagtgtgaagcagagcgcagccctgtgcttgttgcgcctgtacaggacgtcacctgacctagttcctatgggcgactggacatcccgtgtggtacacctcctcaatgaccagcacttgggtgtagtgactgccgcaactagcctcatcaccacactggcccagaagaatcctgaggagttcaagacctctgtctctctagctgtctctcgactgagcagaattgtgacgtccgcgtcaacagatcttcaggattatacttactactttgtcccggctccttggctgtcagtcaaacttctgagactgctgcagtgctacccacccccagaccctgcggtgcgtggccgcctgactgagtgcttggagaccatcctgaataaggcccaggagccccccaagtccaagaaagtccagcattcaaatgccaagaacgctgtgctgtttgaggccatcagcctcatcatccaccatgacagtgagcccaacctcctggtccgtgcctgcaaccagctgggccagttcctgcagcatcgggagacaaacctgcgctacctggctctggagagcatgtgcacactggccagctctgagttctctcacgaggctgtcaagacccacatcgagactgtcatcaatgccttgaagacggaacgagatgtgagtgtgcggcagcgggcagtggacctgctctacgccatgtgcgaccgaagcaacgcccagcagattgtggctgagatgctgagctacctagaaacagctgactactccatccgggaggaaattgtgctgaaggtggccatccttgctgagaagtatgcagtggactacacttggtatgtggacaccatcctcaacctcatccgcattgcaggcgactatgtgagcgaagaggtgtggtaccgcgtcatccagattgtcatcaatcgcgatgatgtgcagggttatgctgccaagacggtatttgaggcattgcaggctccagcatgtcatgagaacttggtcaaagtgggcggctacatcctgggcgagtttggaaacttgatagcgggagacccacgatccagccctctgatccagttcaacctgctccactccaagttccacttgtgcagcgtccccactcgggcactcctgctgtccacctacatcaagttcgtgaacctctttccagaggtaaaggctaccattcaggacgtgctgcgcagtgacagccaactgaagaacgcagatgtggagctgcagcagcgggctgtggagtacctgcgactgagtactgttgccagcactgatatcctggcaactgtcctggaagaaatgccacccttccctgagcgtgagtcctccatcttggccaagctgaagaagaagaagggcccaagcacagtgactgacctggaggagaccaagcgtgagcgaagcatcgatgtgaatgggggccccgaacccgttccagccagcaccagtgctgcgtccacaccttctccatcagcagacctgctgggtctgggggccgttccccctgctcccacagggccccctccctcctctggcggtgggttactggtggacgtgttctcagactcagcttctgcagttgcacctcttgcacccggctctgaagacaactttgccaggtttgtttgtaaaaacaatggtgtgttgtttgaaaaccagctgcttcaaattggactgaagtcagaatttcggcagaatttaggtcgaatgttcatattttatggtaacaagacctccacgcagttcctaaactttactccaacactaatctgtgctgacgaccttcagactaatctgaacctgcagactaagcccgtggacccaactgtggatgggggcgcacaggtgcaacaggtgatcaacattgagtgtatatctgattttacagaggcacctgtcctcaacatccagttcaggtatggtggtaccttccagaatgtttctgttaagcttcccatcactctcaacaaatttttccagcccacagaaatggcttctcaggatttctttcaacgttggaagcagttgagcaatccacagcaagaagtgcagaatatcttcaaagcaaagcatccgatggacacagaaatcactaaagcgaagattattggatttggttctgcgctcctggaagaagttgatccaaaccctgcaaattttgtgggtgctggcataatacataccaaaaccacccagatcggctgcttgttgcgcctggagccaaacctgcaagctcagatgtacagactcaccttgcgtaccagcaaagacaccgtctctcagagactatgtgaattgctgtcggaacagttctaatccacagaccagaagatcaggctctttgtttgtgcgtctctctcgtctctctcgtttgtctttgtaccacactgcagataaacaccccttgtctgaaaactgccattcaaggcacctccagtcctacacctacagccagcccctgggtgtgaagggaatgcaggacacagtttgagaagggctgcagcaggcctgccccgtcaaagaagggtgcctgggcctgggaaatcaaggcagtcctgtggttcaacctaca

SEQ ID NO: 1168 - DNA, 573 bp, Rattus norvegicus
gcttcctgtccggtgagcgtcgaacgactgaagcggtggcccatagtgcattgcgatggcgggtaggcgtgtgtaggcggagccagggccggaagtagaacggtggcggcggcggtgactctggcagctcgggactcagtgcaagtaccacagactcaaccatgactgttcagaggatcttcaggctctcctctgtccttcggtcagcagtctctgtgcatttgaggaggaacattggtgttacagctgtggcgtttaataaggaacttgatcctgtacagaaactcttcttggacaagataagagagtacaaagcaaagcgactggcgtctggaggacctgttgatactggcccagaatatcagcaagaggtggacagagagctttttaagcttaaacaaatgtatggtaaaggagagatggataagtttcctaccttcaattttgaggatcccaaatttgaagtcctcgacaaaccccagtcctgaggaacatacaaaccatgtggtaatttgtcatgacttagttgtacaattaatctaaaaaattcaaataaacattcacttcacagct

SEQ ID NO: 1169 - DNA, 3175 bp, Rattus norvegicus
atgggcaaccgcggcatggaagacctcatcccgctggttaaccggttacaggacgccttctctgccatcggccagaacgcggacctcgacttgccgcagatcgccgtggtaggcggccagagcgccggcaagagctcggtgctggagaatttcgtgggcagggacttcttgccccgaggatccggcatcgtcacccggcgtcccctggtcctgcagctggttaattctaccacagaatatgccgagttcctgcactgcaaggggaagaaattcaccgacttcgaggaggtgcgcctggagatcgaggctgagaccgaccgagtcactggcaccaacaagggcatttcgcctgtgcccatcaacctgcgggtctactcaccccatgtgctcaacctgactctagtggacctgccaggaatgaccaaggtcccagttggggaccaacctcctgacatcgagttccagatccgggacatgcttatgcagtttgtcactaaggagaactgccttatcctggctgtgtcccctgccaactcggacctggccaactctgatgccctcaagatcgccaaggaggtggacccccagggtcagcgcaccattggggtcatcaccaagttggacctgatggacgagggcacagatgctcgggatgtgctggagaacaagctgctcccattgcgcagaggctacattggcgtggtgaaccggagccagaaggacatagatggcaagaaggatatcacagccgccttggctgccgagcgcaaattcttcctctcccacccatcctaccgccacttggctgaccgcatgggcacaccctacctgcagaaggtcctcaaccagcaactgaccaaccacatccgggacacgctgccgggacttcggaacaaactgcagagccagctgctgtccattgagaaggaggtggacgagtacaagaacttccgaccggatgacccagcgcgcaagaccaaggccctgctgcagatggtccagcagtttgcagtggacttcgagaagcgcattgagggttctggagaccagatcgacacttatgaactgtcaggtggagcccgcattaaccggatcttccacgaacgcttcccttttgagctggttaagatggagtttgatgagaaggaactgcgaagggagatcagctacgctatcaagaacattcatggcatcaggacaggcctcttcactcctgacctcgcttttgaagccacagtgaaaaagcaggtgcagaagctcaaagagcccagtatcaagtgtgtggacatggtagtcagtgagctcacgtccaccatcagaaagtgtagtgaaaagctccagcaatacccccgtctgcgggaggaaatggaacgaattgtgaccacccacatccgagaacgtgagggccgcaccaaggagcaggtcatgcttctcatcgacattgagttggcttacatgaataccaaccatgaagacttcataggctttgccaatgctcagcagagaagcaaccagatgaacaagaagaagacttcagggaaccaggatgagattctggtcattcgaaaggggtggctgaccatcaacaacatcggcatcatgaagggaggctccaaggagtactggtttgtgttgactgctgagaatctgtcctggtacaaggacgatgaggagaaagagaagaagtacatgctgtctgtggataatctgaagctgcgtgatgtggagaagggcttcatgtcaagcaagcatatttttgccctcttcaacactgagcagaggaatgtctacaaggattaccggcagctggaactggcctgtgagacacaggaggaggtggacagttggaaggcttcctttctgagggctggcgtgtaccctgagcgtgttggggacaaggagaaagccagtgagactgaggagaacggctctgacagcttcatgcactccatggaccctcagctggagcgccaggtggagaccatccggaacctggtagactcgtacatggccattgtcaacaagactgtacgggatctcatgcccaagaccatcatgcacctcatgatcaacaataccaaggagtttatcttctctgagctgctggccaacctgtactcttgcggggaccagaacacgctgatggaagaatcggccgaacaggctcagcggcgcgacgagatgctgcgtatgtaccacgcactgaaggaggcgctcagcattatcggcgacatcaacacgaccaccgtcagcacgcccatgcccccgcccgtggacgactcctggctgcaggtgcagagcgtaccggccggacgcaggtcgcccacgtccagccccacgccgcagcgccgagcccccgccgtgcccccagcccggcccgggtcgcggggccctgctcctgggcctccgcctgctggatccgccctggggggggctccccccgtgccctccaggccgggggcttcccctgacccctttggcccccctccccaggtgccctcgcgccccaaccgcgccccgcctggggtccccagaatcactatcagtgacccctgaggagtgtcagctacgccgatcgggtcaggcaagtccgtcccgtcctgagagccccaggccccccttcgacctctaaccagatccctcctactcctcggagacctcccttatcaagcctgcctggacagctgttctgtgacttgacagtggctcccccgaccccaaagcgtcctattcatcatctgtgacttagtctgttgtagtggtgagctgatacatccaaatgtgatgttggtgaaaacttgtgcccctctgtggtattgctcctgcgacattctataaatatctataaatatacctatatatacatatatatacatatatatggctgacacagcctcgcctgtagtgtcagaatcaaccaccatgctgtccttgtggagtcctgtggtccaactacaagggaacgctgtcatcctgacatcccccctccaatgtgccacctccagtgagcctccctgtcccttggcctgtggacagccatccccttggccatccccaccctgcacaaggggatgctgcaccagcagctgtgcggttctctgatggccaccagtcttgctgtctcttggctgagaataaaacccatttctggacaatggggaaaaaaaaggaattc

SEQ ID NO: 1170 - DNA, 811 bp, Rattus norvegicus
tccatcttccctccaggcaccatccaggaggattacctgagggagctgctcaccaccatgggcgaccgcttcacagatgaggaagtggatgagctgtacagggaggcccccatcgacaaaaaggggaatttcaactacatcgagttcacgcgcatcctcaagcacggagcgaaagacaaagatgactgaagagctgtggcttccagccaaatgtccctgttgccattgggtcctcctggagcggtcggctgcccttgcttttctgccttttgcttcccttgttttgtatttattctcagccactttgggccacgtgtaccttcatcatcagactggaaacgggactttctgtcattgttcgatgagaacgtaaggtaatttaacttacagacagtcttgtcccttgtaataactgcagccacagagtcagtatattttttcagagaaagttatccactcaattttttctgaatgataattaaactttctgataaaatacttagttgtttagccttctttccctacttgacttttagttttaccgagtctttccccaagcagggtagatgaggtgaatgacagcctgtcagagtttgctcccactcttcagttgtgtttccagttgtgtttccatcggcaatcccagtttcctctactcctagtttattctctctctccctcctggaaatcaagataaagctccttgggtacccaagactttgtcttccagtttggaaaataaggcctgaattctcgatccctggggtagctcagactccccttaaacgtctctctgcattacttcctgcag

SEQ ID NO: 1171 - DNA, 1443 bp, Rattus norvegicus
tgaaagtctccagtttctcagagctggttgtgagcaacaccagaaactgctgtaccacaccctggtagaagtgcgtcagtattcgcaactgggaacacatttttggtatggagtcctggaattctcggatcctcttgttctcttcctcttcctctgccgcagtcactccccactggccctcagtttcacgctgtttcttcttccttggacgaggcgacatggcggcggcgctgctgctggcgctggccttcacgttcctgagtggccaaggcgcctgcgcggcggcgggcaccatcgtaacctctgtccaggaagttgactccaagacacagcttacctgctttttgaacagcagtggcattgacatcgttggccaccgctggatgagaggtggcaaggtactgcaggaagacacgctgcccgatctacagatgaagtacacggtggatgcagatgaccgctctggagaatattcctgcatcttccttcctgagcctgtgggcagaggcaacatcaatgtggaggggccacccaggatcaaggtgggaaagaaatcggaacacgccagtgagggagagtttgtgaagctgatctgcaagtctgaggcgtcccaccctcctgtggatgagtgggtctggtttaagacctctgacactggggaccagactatctccaacggcactgaggccaatagcaagtacgtcattatatccacgcctgagctgtcagagctgatcatcagcgacctggacatgaacgtggaccctggcacctacgtgtgcaatgccaccaactcccagggcagtgctcgggagaccatctcactgcgtgtgcgcagccgcctggcagccctctggcccttcctgggcattgtggccgaggtcctggtgttggtcaccatcatcttcatctacgagaagaggcggaagccggaccagaccctggacgaggatgatcctggcgccgccccactgaagggcagcgggtctcacctgaatgacaaggacaagaatgtgcgccagaggaacgccacctgagcggcggggcaggcggggaggggaggtgccagggcacttgaccccagcccagcgtctgcctccactcctgtgtcccatcctgtcccgacctgagcctgcccaacccaacttcttatcccagcccaagtgaagacagagccttaccttacagaaaacccatctgggagaagcaggccacttgcagtacccctgtttctagtttaaactgaatgaggtttctatgcagacaatccattccttagggctacgtttttattttccttcccttctgaagtatgtcactacagccctgtggagtgggggagtggggtcatgagggaaaggccagggcacacatgctctgactttaccctgttggagggggctgggcctgctgggaccccacaaataaagacctacaccacca

SEQ ID NO: 1172 - DNA, 1822 bp, Rattus norvegicus
aggccagctttggatcctgcagggagcggggagctgagagaagagacgctgagaaagcgggcgcaccacggagggagagaaaagctccagaagccgggcagcgcttttacgcacagctaccaactggccgctgccgaccgtctccagctcccgaggacgcgcgaccggacgccgggtcccgccacagccgaggacagctcgccggtcgccgcagcgaggcccggagcggcccttcagggggacctttcccagatcgcccaggccgcccggatgtgcacgaaaatggaacagcctttctatcacgacgactcatacgcagcggcaggatacggtcggagccctggcagtctttctcttcacgactacaaactcctgaaacccaccttagcgctcaacctggcagatccttatcggggtctcaagggtcctggggcgcggggtccaggcccagagggcagtggggcaggcagctacttttcgggtcagggatcagacacaggcgcatctctgaagctagcctccacggaactggagcgcttgatcgtccccaacagcaacggcgtgatcacgacgacgcccacgcctccgggacagtacttttacccccgtgggggcggcagcggcggaggtacagggggcggcgtcaccgaggagcaggagggctttgcggacggttttgtcaaagccctggacgacctgcacaagatgaaccacgtgacgccccccaacgtgtctctgggcgccagcgggggtccccaggccgggcctgggggcgtctatgctggtccggagccgcctccggtctacaccaacctcagcagttactccccagcctctgcaccctctggaggttccgggaccgccgtcgggactgggagctcatacccgacggccaccatcagctacctcccacatgcaccaccctttgcgggcggccacccggcgcagctgggcttgagtcgcggcgcttccgcctttaaagaggaaccgcagaccgtaccggaggcacgcagccgcgacgccacgccgcctgtgtcccccatcaacatggaagaccaggagcgcatcaaagtggagcgaaagcggctgcggaacaggctggcggccaccaaatgccggaagcggaagctggagcgcatcgcgcgcctggaggacaaggtgaagacactcaaggctgagaacgcggggctgtcaagtactgccggcctcctacgggagcaagtggcgcagctcaagcagaaggtcatgacccacgtcagcaacggctgccagttgctgctaggggtcaagggacacgccttctgagagcctcccttgctccatacggacacccccagccttgaaggctgggcgcccgccccccactggggtgaggggggcaggcgatgggcactcgcccagaggtctggggcgcagctcacacactggactctggcctgcccgcctgcgcccagtccttccacctcgaggtttacatggcccccttccagcgtattttgtatgttttttttttctggaaagagactgaattcatattgaatataatatatttgtgtatttaacagggaggggagaagggggttgtcgcggcggagctggccccgccgcctggtactcagcctgtggggatactagggaggaacctccgccccctgccctccccctctgcacagtactgtggagaagaaacacgcacttcgtgtctaaagtctattttaagatgtgtttgtgtgtgtgtttgactttttattgaatctatttaagtaaaaaaaaagtctttattaaaaaaaaaaaaaaaaaaaaaaaaaaaaaaaaaaaaaaa

SEQ ID NO: 1173 - DNA, 2175 bp, Rattus norvegicus
gcagaaatgcttcgactacccacagtccttcgccagatgagaccagtgtctcgggcactggctcctcatctcactcgggcctatgccaaagatgtaaaatttggtgcggatgctcgagccttaatgcttcaaggtgtagaccttttagccgatgctgtagctgttacaatggggccaaagggaagaacagtgattattgaacagagttggggaagtcccaaagtaacaaaagatggggtcactgttgcaaagtcaattgatttaaaggataaatacaaaaatatcggagctaagcttgttcaggatgttgccaataacacaaatgaagaggctggggatggcaccaccactgccactgttctggcacggtctattgccaaggagggctttgagaagatcagcaaaggggctaatccagtggaaatccggagaggtgtgatgttggctgttgatgctgtaattgctgaacttaagaaacaatctaaacctgtgacaacccctgaagaaattgctcaggttgctacaatttctgcaaacggagacaaagacattgggaacatcatttctgatgcaatgaagaaggttggaagaaagggtgtcatcacagtgaaggatggaaaaaccctgaatgatgagctagaaattattgaaggcatgaagtttgatagaggatatatttccccatattttattaacacatcaaaaggtcaaaaatgtgaattccaagatgcctatgttttgttgagtgaaaagaaaatttctagtgttcagtccattgtacctgctcttgaaattgccaatgctcaccggaagcccttggtcataattgctgaagatgttgatggagaagctcttagcacactggttttgaacaggctaaaagttggtcttcaggttgtagcagtcaaagctccagggtttggggacaacaggaagaaccagcttaaagatatggctatcgctactggtggtgcggtgtttggagaagagggtttgaatctaaatcttgaagatgttcaagctcatgatttagggaaagttggagaggtcatcgtcaccaaagatgatgccatgcttttgaaaggaaaaggtgacaaagctcacattgaaaaacgtattcaagaaatcactgagcagctagacatcaccactagtgaatatgagaaggaaaagctgaacgagcgacttgctaaactctcagatggagtagccgtgttgaaggttggagggacaagtgatgttgaagtgaatgagaagaaagacagagttacagatgctctcaatgctacaagagcagctgttgaagaaggcattgttctaggagggggctgtgctctacttcggtgcatcccagccttggattcattaaagcctgctaatgaagatcagaagataggtatagaaattattaaaagagcacttaaaattcctgcaatgacgattgctaagaatgcaggtgttgaaggatctttgatagttgaaaaaattctgcagagttcctcagaggttggctatgatgccatgcttggagattttgtgaacatggtggaaaagggaatcattgatccaacaaaggttgtaagaactgctttactggatgctgctggggtggcccccctgctaactacagccgaagctgtagtgacagaaattcctaaagaagagaaggaccctggaatgggtgcaatgggtggaatgggagggggtatgggaggtggcatgttctaactcctagaatagtgctttgcccttatcaatgaactgtggcaggaagctcaaggcaggttcctcaccaataacttcagagaagtcacctgaagaaaatgactgaagagaaggctggctgatcactgtaaccatcagttactggtttcctttgacaatacataatggtttactgctgtcattgtccatgcctacagataatttattttgtatttttgaataaagacatttgtacattcctgatgctgggtgcaagagccagtgtcctgctttcaacttaaatcactgaggcatctctactgttctgttagcatcaggactgtagcgctgtgtcaccacatgagaagttcagaagcagcctttctgtggagggtgagaatgattgtgtacagagtagagaagtatccaattatgtgacaacctttgtgtaataaaattttgtttaaagtt

SEQ ID NO: 1174 - DNA, 542 bp, Rattus norvegicus
ggaaaggatcaattttcatccgaacgttcctgacaggagaaaaccatgagtaaagttggtattaacggttttggtcgtatcggtcgactggtgttgggtcgattacttgaagtcaaaagcaacatagacgttgtcgctattaatgatctcacttccccatacattctcgcctacctgctgaaacatgattcaaactacggaccattcccctggagcgttgattttacggaagattcacttatcgttgatgggaaaagtatcgcggtttacgccgaaaaagaggctaaaaatattccgtggaaagcgaaaggtgcagaaatcattgtcgaatgtactggcttttatacctccgccgagaaatcgcaggcgcatcttgatgctggtgcgaagaaggtgttgatttccgcccctgccggtgaaatgaaaactatcgtttataacgtcaatgacgacactctggatggcaacgacaccattgtttccgtggcgtcatgcaccactaactgtcttgcgccgatggccaaagccttgcatgacagttt

SEQ ID NO: 1175 - DNA, 4319 bp, Rattus norvegicus
cttggtggcctccattgagatccggaggatccaaggactgtgtagctacaatgttgtcaagacttttccgtatgcatggcctctttgtggcctcccatccctgggaggtaattgtgggaacggtgacacttactatctgtatgatgtccatgaacatgttcaccggcaacaacaagatctgtggttggaattatgagtgcccaaaatttgaagaggacgtgctgagcagcgacatcatcatcctcacgataacccggtgcatcgccatcctgtacatctacttccagttccagaacctgcgtcagcttgggtcaaagtacattttgggtattgccggcctcttcacaattttctcaagtttcgtcttcagcactgtcgtcattcatttcctcgacaaagaattgacaggcttaaatgaagctttgcccttttttctgctcttgattgacctttctagagcgagtgcattggccaagtttgccctgagttcaaactcacaggatgaagtaagggagaatatagcgcgtgggatggcgatcctgggccccacgttcacccttgacgctctggtggaatgtcttgtgattggagttggcaccatgtcaggggtgcggcagcttgagatcatgtgctgctttggctgtatgtccgtgcttgccaactactttgtcttcatgacattcttcccagcctgcgtgtccctggtcctagagctttctcgggaaagccgtgagggtcgtccaatttggcagctcagccattttgccagagttttagaagaagaagagaataaaccaaacccagtaacccaaagggtcaagatgatcatgtctttaggcctggttcttgttcacgctcacagtcgctggatagctgatccttctcctcagaacagcacagcagaacagtctaaggtttccttgggtctggctgaagatgtgtccaagagaattgagccgagtgtttctctctggcagttttacctctccaagatgatcagcatggacatcgagcaagtgattaccctgagcttagcgttgcttttggctgtcaagtatattttctttgaacaagcagagacagaatcaacactctcattaaaaaatcctatcacatctcctgtcgtgaccccaaagaaagctcaagacaactgttgtagacgtgagcctctgcttgtgaggaggaaccagaagctttcgtcagtggaggaggatccaggagtgaaccaagacagaaaagttgaggttataaaacctttagtggcagaagccgagacttcgggcagagctacgtttgtgcttggcgcctctgcagccagccctccattggccctgggggcacaggagcctgggatcgaactccccagcgagcctcgacctaatgaagagtgtctacagatactggagagtgcagagaaaggtgcgaagttccttagtgatgcagagatcatccagttggtcaatgctaagcacatcccagcctacaaactggaaaccctcatggagacgcacgagcgtggtgtgtctattcgccggcagctcctctccgccaagcttgcagagccatcttctctgcagtacctgccttacagagactataattactccttggtgatgggagcttgctgtgagaacgtgatcggatatatgcccatccctgttggagtggcaggacctctgtgcctggatggaaaagagtaccaggtgccaatggcaacaacagaaggttgtcttgtggccagcacgaacagaggctgcagagcgatcagtcttggtggaggtgccagcagccgggtccttgcagatgggatgagccgaggcccagtggtgcgtcttcctcgtgcttgtgactcagcagaggtgaagagctggcttgaaacacctgaagggtttgcagtggtaaaggaggccttcgacagcacgagcagatttgcacgtctacagaaacttcacgtgacgctggcaggacgcaacctctacatccgtctccagtccaaaacgggggacgccatggggatgaacatgatttccaagggtacggagaaagcacttctgaagcttcaagagttctttcctgagctgcagattctggcggtcagtggtaactattgcaccgacaagaaacctgctgccataaactggatcgaagggagaggaaagactgtggtttgtgaagctgtcattccagccaaggtggtgagagaagtattaaagacgactacggaagctatggttgacgtaaacattaacaagaatcttgtgggctctgccatggctggtagcataggaggctacaacgcccatgctgccaacatcgtcactgccatctacattgcatgtggccaggatgcagcacagaatgtggggagttcaaactgtattacgttaatggaagcaagtggtcccacaaatgaagacttatacatcagctgtaccatgccgtctatagagatcggaaccgtgggtggtgggaccaaccttctacctcagcaagcctgcctgcagatgctaggtgttcaaggggcgtgcaaagacaatcctggagaaaatgcacggcagcttgcccgaattgtgtgtggcactgtgatggctggtgagttgtccttgatggcagcattggcagcaggacatcttgtcagaagtcacatggttcacaacagatcaaagataaatttacaagatctgcagggaacatgcaccaagaaggcagcttgagcatcctgacatactggactgaaacacgggcattgggttctccaggactaacatgaaatctgtgaattaaaaatgtcagtgcagtgtcttgtggaagatgaacgtgatcagtgaggcaggcacctgcttggtttctggctctttagagacgtctgcggtcctttgcacagactcctcagacgtgggaactatggttctttccgtgccgtgttctagaaagatctcatgtggatgtcatggtgctctgagcaccacagatgtgactgcagctcgtttctgaaagctgccacaagctggaagctggtgttttgacgaaatgatggatcctggtgatcagtgtggggctcacctccaatgggttaaaatggagttttaaatgacactgtagctgacagaacttctgatttttatttattcagtctgggttgtagaactttgcaatctaagtttattttttgtaaactaataattcatttggtgctggtctattgatttttggggacctacttcttcatggaagaattacttttattctcaaactacagaataatgtgctaagtagtgctaaatagttctcgacgaagaaaagagtcgctgtgttcatctcagtctttgttcagagaggcctttagctgtgccacagtctgcactaaagacacagagctcttagtgttagagcagagtacaagcaggtcggacctctcaggacttagagtgtgggagcagtttttaaagaaaacaaccattgctctaagccaactttctttggagacattttaacttatttagctgaattctagatttcttggtaaactatcaaatctgtatatgttgtaataaagtgtctaatgctaggagtttattggaagtgtttaagaaataaaagtactcagcttttacacggataaaatgctctagcttgggccagagaagacctcgctcaggagcattggtccgggaaagcctggcttgcttgccgagcctaatgaagggaagtcagcctacagagccagtgatggagccacatgaatggccctggagctgtgtgccttgttcctgtggccaggagttgggtgactgaatcatttatgggctcctttggtggacccataaaagctcttagcttcctcagggggtcagcagagttgttgaatcttaatttttttttaatgtaccagttttgtataaataataataaagagctccttattttgtattctatctaatgcttcgtttggtcttggaagcggacgtctgtgtagaagacggactctgaaagacattccgagtgaggcggcggcggcggcggcggcacgggagctcagtgattgtgtcagtattattgtggaaggttgactttgctgttgtatgtaaagtttccagttgcgcctcttgtgacttttcagccagtaccattttatttacctgagcttgtcgtggaagtggtagtaaaccgcattgagtgttgatgctggtgactgtgatcagtgtcatcgtgctaagtccatgttttgtacaattactaaattgtatacattttgttatagaatactttttccagttgagtaaattatgaaaggaagttaacattaaaaaaaaaaaaaa

SEQ ID NO: 1176 - DNA, 4259 bp, Rattus norvegicus
aaaaaagaggattccgtggcttaaaaaaaaagtttgaaagcctctgacttaatagtttccaccaccaaggaaactgaggcccagagagaggaaatgacctgggtaagatctccgagggaccagtagttgaacagggactaggagttaaaatttcatgggaggtgcctgtaacaggacctgccttggggtctctgctggaaagagagacctgattgggtttcccagcagtcttcagtggcttgctccgtggctgcctcagccaggtctccagcagccacacctggggatctggcccccgtcctgtcctccagccccacccacctcggctccatgccccccccagtcagcttcgggaccctggcagtgagcaggcacgtggcagccaaggccctgtgaccaggccagggagacggagctctggggtcccagtcacctgcccccccatggagctgagaccctggttgctatgggtggtagcagcagcaggagccttggtcctgctagcagctgaagctcgcggccagaagatcttcaccaacacgtgggctgtgcacatttctggaggcccagctgtggctgatagtgtggcacggaagcatgggttccacaacctgggccagatcttcggtgactattaccacttctggcacagagcagtgacaaagcggtccctgtcgcctcaccgcccgcggcacagccggctacagagggtgcctcaagtgaagtggctggagcagcaggtagccaagcaaagggccaagagggacgtgtatcaggagcccacagaccccaagttccctcagcagtggtacctgtctggggtcactcagcgagacctgaatgtgaaggaagcctgggcccagggcttcacagggcgtggcattgtggtctccatcctggatgacggcattgaaaagaaccatcctgacttggcaggcaattatgacccgggagccagctttgatgtcaatgaccaggaccctgacccacagcctcggtacacgcagatgaatgacaacaggcacggcactcggtgtgccggggaagtggcagcggtggccaacaatggtgtctgtggtgtaggtgtagcttacaatgcccggattggaggggtgcgtatgttggatggcgaggtgactgacgcggtagaggcacgttcgctgggcctgaatcccaaccacatccacatctacagcgccagctggggccccgaggacgacggcaagaccgtggatgggccagcccggctcgccgaggaggccttctttcggggagttagccagggccgcggagggctgggctccatctttgtctgggcctcagggaatgggggccgggaacatgacagctgtaactgtgacggctacaccaacagtatctacacgctgtccatcagcagtgccacacaattcggcaacgtgccctggtacagtgaggcctgctcctccacactggccaccacctacagcagtggcaaccagaatgagaagcagattgtgacaactgacttgaggcagaagtgcactgagtctcacacaggcacctcagcctccgcccctttggcagctggtatcattgctctcaccctggaggccaacaagaacctcacctggcgggacatgcagcacctggtggtgcagacctcaaagccagcacatctcaacgctaacgattgggccaccaatggcgtgggccggaaagtgagccattcctatggctacgggctgttggatgcaggtgccatggtggccctggcccagaactggacaacagtggccccccagcggaagtgcatcattgaaatcctggcagagcccaaggacattggcaaacggctagaggtgcgcaagaccgtgacagcgtgcctgggtgagcccaaccacatctccagactggaacacgttcaggcacggctcaccctgtcttacaatcgccgtggtgacctggctatccacctcatcagccccatgggcacccgttccaccctattagctgccagaccacatgactactctgctgatggatttaatgactgggctttcatgacaactcattcctgggatgaggacccctctggcgagtgggtcctagagattgaaaataccagcgaggccaacaactatgggacgctgaccaagttcactctcgtcctatatggcacagcctctgagggtctctctgcacctccagagagcagcggctgcaagaccctcacatccagccaggcctgcgtggtgtgtgaggaaggtttctcactgcaccagaaaagctgtgtccagcgttgcccaccaggcttcacaccccaagtccttgatacacactacagcactgagaatgatgtggagatcatccgtgccagcgtctgcaccccctgccacgcctcatgtgccacttgccagggcccagctcccacagactgcctcagctgccccagccatgcctccctggaccctgtggagcaaacctgctcccggcaaagccagagcagccgagagtcccgacctcagcagccacctcccgcactgcgcccagaggtggaagtggagccccggttgcgggctgggctggcctctcacctgccggaggtcctggccggcctcagctgccttatcatcgctctcatctttggcatcgtcttcctcttcctgcatcggtgttcaggcttcagcttccggggagtgaaagtgtacaccatggaccgtggcctcatctcctacaaggggctgcctcctgaggcctggcaggaggagtgcccatctgactcagaagaggatgagggccggggcgagaggaccgcctttatcaaagaccagagcgccctttgatgagcccactgcccaccctatcaaatcgatcccttcctcggcactttttaattcaccaaagtatttttttatcttgggactgggtttggaccctagctgggaggtgagaggggcagagacccttgggcctacctgtttgcctgaggtggggtcccgggagcctcaccccccaccaaccctccatgtggaggaaggagtaaatctttagggcagcttcctgcagagtgaagaggggcagcctttctgactccctggccagctgcagccttgcccctcccctgcccctcagaaagcaataatggtccccatccaggcaacagggaggctggccaggaggtacttgaagaaggtggccacctctccaagggcttttgcatcccctgaccctctctggctcaggatgagcctctgaagaagcttgcagtcacaggaagggaccaaagcaaacgaggcactctccagtgtgcctgcactcttgctctcagcctgcctctgcactccaggtctccacctcagctggtagccaggctgagctagacctgcacaggtcaggctctggggccttatgctggtgtcctgaccatcctctatggcaccccccccccaagccagggccttgttttctgagcccggggctgcctgggcagttggcgctcacagtccaggagcccctgggtgggtggtggggagggacggtggctcctcccacctcccacccgatgctgctttcccctgtggggatctcaggagctgtttgaggatatattttcactttgtgattattcactttagatgctgatttttttttttttgtatttttaatgggggtagcagctggaccattcaccttctcctacccatgtccaccctgcctttcccatggctgcccagctctgaggcagagggaatcactaagccccaagtcctgaagaggcaggccagccagctgggctccaggaaagggggtcatggtgggaggggtaggctgacatcatctgtttcaaatggggttgtgccacaggcttttgggttgctggctctccaagtgccaggggtgggcaggtggcaccaccaagcccaaactaacactgtgccctggtggagaaagcattggcctatgatgccccccaaaccccctgttctgatgtgcctttcgcacccctcccattaggacaatcagtcccctcccacttgggcctcctcttttctttttcctagcccttctcggtacccaacctacctgtccagggtgccccttgctctcctgcccacccctagcggccatccaggctggttttgtaagatgctgggttggtgcacagtcatttttttttccttgtaatttaaacaggcctggcattgttggttctatttaatggacacgagataatgttagaggttttaaagtgattaaacgtgcagactatgcaaacc

SEQ ID NO: 1177 - DNA, 2189 bp, Rattus norvegicus
acccgcccgtcgttccgcacagggttggatagttgtgtcggccagggtggctccaggatgttagggactgtgaagatggaagggcatgagagcaacgactggaacagctactacgcggacacgcaggaggcctactcctctgtcccggtcagcaacatgaactccggcctgggctccatgaactccatgaacacctacatgaccatgaacaccatgaccacgagcggcaacatgaccccggcttccttcaacatgtcctacgccaacccgggcttaggggccggcctgagtccgggtgctgtggccggcatgcccgggggctctgcaggcgccatgaacagcatgacggcggcgggcgtcacagccatgggtgcggcgctgagcccgggaggcatgggctccatgggcgcgcagcccgcggcctctatgaacggcctgggtccctacgctgccgccatgaacccgtgcatgagtcccatggcgtacgctccgtccaatctgggccgcagccgcgcggggggcggcggcgacgccaagacgttcaagcgcagttaccctcacgccaagccgccctactcctacatctcgctcatcaccatggccatccagcaggcgcccagcaagatgctcacgctgagcgaaatctaccagtggatcatggacctcttcccctattaccgtcagaaccagcagcgctggcagaactccattcgccactcactgtctttcaacgcttgtttcgtcaaggtggcgcgatccccggacaagccgggcaagggctcctactggacgctgcacccggactccggcaacatgttcgagaacggctgctacttgcgccgtcaaaagcgcttcaagtgtgagaagcagccgggggccggaggtgggagtgggggcggcggctccaagggggtcccagaaaaccgcaaagacccctcaggcccggttaaccccagtgccgaatcacccattcatcggggtgtgcacggaaaggctagccagctagagggcgcgccggcccccgggcccgccgccagcccccagactctggaccacagtggggccacggcgacagggggcggttcggagttgaagtctccagcttcttcatctgcgccccccataagctccgggccagggggctggatctgtacccccctctcaccgacatggcttgccccccacgaatctcagctgcacctgaaaggggccccccactactcctttaaccaccccttctccatcaacaacctcatgtcctcctcggagcagcagcacaagctggacttcaaggcatatgagcaggcactgcagtactctccttacggcgccaccttgcccgccagtctgccccttggcggcgcctcagtggccacgaggagccccatcgagccctcagccctggagccggcctactaccaaggtgtgtattccagacccgtgctaaatacttcctagctcccagaactgagggtttgtctgcatggccaacctggtatggtagcaggagagaaaaaccaacagtaaacacacacacacacagagtcacacacacatacagagtcacacacacagacacacacacacactgacacactcacactgacacactcacagagtcacacacacatacagagatatctgcaaatacagctcagggtttgaaagaataatatataaccgaagactaagaaagtgtgtgagcccagtatgcattcacagaactccaggtattttgtgggaactgagtgactttggaagtgaaagcagatgcagcagcattggaaagtagcccagaactccacactggctgaaacttggattttattcaccaagctgcatgtccttggttctggaaagcaatttagttcttgttcttctttcggtgagcatgaaactggactgctcaggagtatggaaactgtaaaaacttcagagtcagcaaaaggaaatcatgacttcactttagcagaggagattttaaaacttctgacttttgagaccacatcttaataactacataagaaaccctgagttatgatgacccagctaaacaagttccccaaacactagcatcatcagctgcgacagtgttcactaaccctttgcttgaaattgatgtcacaagcttcaggcaggtaccctgtctgtcctgtcccagtgctagacagcctgatgtgatggaattc

SEQ ID NO: 1178 - DNA, 1121 bp, Rattus norvegicus
cttggccatccgggttggttcttctccagctgagtaaagcggcgctgatctgcaccctcactgtcttcctccggatccacataaaattcagaagccatgtctcgaagatatgactccaggaccacaatattttctccagaaggtcgcttataccaagtggaatatgccatggaagccattggacacgcaggcacttgtttgggaattttagccaatgatggcgttctgcttgcagcagagaggcgcaacatccacaagcttcttgatgaagtctttttttctgagaaaatttataaacttaacgaggacatggcttgcagtgtggcaggcataacatctgatgccaacgttctgactaatgaactcaggctcattgctcaaaggtacttattacagtatcaggagccaattccctgtgagcagttggttacagcactgtgtgatatcaaacaggcgtacacacagtttggaggcaaacgtccctttggtgtttctttgctgtatattggctgggataagcactatggctttcagctctatcagagtgacccaagtggaaactacgggggatggaaagccacatgcattggaaacaacagtgctgcagcggtatcaatgctgaaacaagactacaaagaaggagaaatgactctgaagtcagcgctggctctggctgtcaaggtgctaaacaagacaatggatgttagtaaactgtcagctgaaaaagtggaaatcgccacactaacaagagagaatggaaagaccgtgatcagagtcctcaagcaaaaggaagtggaacagttgatcaaaaaacatgaagaggaagaagcgaaagctgaacgggagaagaaagaaaaagaacagagagaaaaggataaatagacagaatcatggattttataactccttagaggcgccagttcacttaggagctgtcctggccttcccctggaagtgttttcttgtattttcttccttaccttggccatcggggaaatgggacattgcatactgaattgggtccatgtctgtccagctggatgctttattgtaatgatggacatctttataaacatcttaatctcgacacataatttttggaataaaacctggaaagattg

SEQ ID NO: 1179 - DNA, 1260 bp, Rattus norvegicus
ggtttttctctccccagcttcatctctgcctactgtctgacctgctctgcttcaagaaaggcaccatgctgctctggatggttctactgctctgtgtttccatgactgaagcccaagagttgttccaggatcctgtgctgagtcgtctcaactcttcagagacatcagatctgctcctgaagtgtacaaccaaggtggaccccaacaagccagcttctgagctcttttactctttctacaaggacaaccacatcattcagaacaggagtcacaacccactatttttcatctcagaagccaatgaggaaaactctgggctttaccagtgtgtggtggacgctaaggatggcacaattcagaaaaagagtgactatctggatatcgacctctgcacttctgtatcccaacctgtgctgactctgcaacacgaagccactaaccttgctgaaggagacaaagtgaagtttctttgtgagacccagctgggctcccttcctatcctttactcattctatatggatggagagatcctaggggaacctctggctccctctggcagagctgcctccctcctcatctcagtgaaggcagagtggagtggcaagaactactcctgtcaagctgaaaacaaagtctccagagatataagtgagcccaagaagttccccttggttgtctcaggtactgcctcaatgaagagcaccacggtggttatctggctacctgtaagctgcttggtgggatggccatggctgctgcggttctgatttagttcttcaagccctgcaaaaaaaaaacatggtatgaaaataagaggctgcttatcacagcaggtgattgtgatttgccgtctgcactagcaaggacatgatttttgccaattgtagataatctaatctaggggactctggagagggtatgaatgacagagcctagagagggattaggggcgctatggagaaggatgctgctgctgctgctggtcttcttgctcctggtggctgttgttaaggattgtcatgtggtcgtgttcaagagaagaagtcggaggcatgactatgaagattggacttgcttcaaggaacccaatgccccaaatcagcagaaagtagtataaaaaaggtctatgccccactttcccctctagccttctttctctcctaactagtgtttgtgagttggaattggggtggaaaagggtttggaggggaggcggagttataagaacctaataaagtagctttcaaaatatctcagaaa

SEQ ID NO: 1180 - DNA, 2328 bp, Rattus norvegicus
cacaaccccttctttttccgttcttggaaaatggtgtccaagctcacgtctctccagcaagaactcctgagtgccctgctgagctccggagtcaccaaggaagtgctgatccaggccttggaggaattactgccgtccccgaatttcggggtgaagctggagacactgcccctgtcccccgggagcggggcggatctcgacaccaagccggttttccatactctcaccaatggccacgccaagggccgcttgtctggggacgagggctcagaggacggcgacgactatgacactcctcccatcctcaaagagctccaggcgctcaacaccgaggaggccgcggagcagcgggccgaggtggaccggatgctcagtgaggacccatggagggccgccaaaatgatcaagggatacatgcaacagcacaacatcccccagagggaggtggttgatgtcacaggcctgaaccaatcccacctttctcaacacctcaacaagggcacccccatgaagacccagaagcgagctgccctgtacacctggtacgtcagaaagcaacgggagatcctccgacagttcaaccagacagtccagagctctggaaacatgacagacaaaagcagtcaggatcagctgctatttctctttccagagttcagtcaacagaaccagggccctgggcagtcggaggacgcctgctctgagcccaccaacaagaagatgcgccgcaaccggttcaaatgggggcccgcatcccagcaaattttgtaccaggcctacgaccggcaaaagaatcccagcaaggaagagagggaggccttagtggaggagtgtaacagggcagaatgtttgcaacgaggggtctccccctccaaagcccatggcctaggctccaacttggtcacggaggtccgtgtctacaactggtttgcaaaccgccggaaggaagaggcattcagacagaagctggccatggatgcctatagctccaaccagacgcacaacctgaaccccctgctcacccatggctcccctcaccaccagccaagctcctctccacccaacaagttgtcaggagtgcgctacagccaaccgggaaacaatgaggtcacttcctcttcgacaatcagtcaccatggtaacagtgccatggtgaccagccagtcagttttacaacaagtctccccggccagcctggacccaggccacagtctcctctcacctgacagtaaaatgatctcggtgtctggaggaggactgcccccggtcagcaccttgacgaatatccacagcctctcccaccacaatccccagcaatctcaaaacctcatcatgactcccctgtccggagtcatggccattgcacagagcctcaacacctcccaagcccagggtgtcccagtcatcaacagtgtggctagcagcctggcagccctacagcccgtccagttctctcaacagctgcacagccctcaccagcagcccctcatgcagcagagcccaggcagtcacatggcccagcagcccttcatggctgcggtgactcagctacagaactcccacatgtatgcacataagcaggagccccctcagtattcccacacctcccggttcccatctgcaatggtggtcacagataccagtagcatcaataccctcaccagcatgtcttccagtaaacagtgtccactgcaagcctggtgatacccacataaccactcactttgtgcacagcaacgaggaccccattttccacaccatcagtttctgggcatctgtcatagagaagtccagcgacctgacaggcacctgggaagccaggagagatccctgcttacctgacatctgccggggacctccgacaagcccaagccactctcaggaggtgcagcccgaagcccagcttctcttctttgcagtattgtcgtaatgcctctcccaagatgccaagtgcccttgtttctcccagaggtggccggtgcaaaatggtgcaacaggaatcgagaagcccatggagtttccactgcaatccgtcattgaacaaactgatgcaaaaacttgaatctgttactgaaataagatgaggaccgaggagggtgtgtgctactgaactgagccagacactgtaaataactgacagacccccctctcccatcccagtgtctcaagatttcttctaaagaagtaaatttgtcaatgggtgtaaactatcaactactgtattaagtgcaatttttccttccacagatatctacccctgcccgatataatactaaagtgtctatcacttttcttgtaaaggtagagttaaattccaaaaaaaaaaaa

SEQ ID NO: 1181 - DNA, 817 bp, Rattus norvegicus
aacaccaaatggcggatgacgccggtgcagcgggagggcccggaggacccgggggcccaggattaggaggccgcggggctcgtggaggtaaagctgaagacaaggagtggatccccgtcaccaagctgggccgcctggttaaggacatgaagatcaagtccttggaggagatctacctgttctccctgcccattaaggagtctgaggttattgactttttcctgggtgcatctctaaaggatgaagttctgaaaatcatgccagtgcagaagcagactcgggctggccagcggaccaggttcaaggcctttgtcgctattggggactacaatggccacgttggtcttggtgttaagtgctccaaggaggtagccactgccatccgaggggccatcatcctggccaagctttcgaccgtcccagtgtggagaggctactgggggaacaagattggcaagccccacactgtgccatgcaaggtgacaggccgctgtggctctgtgctggttcgtctcatccctgcccccagaggcactggcattgtctctgctcctgtgcccaagaagctactgatgatggctggtatagatgactgctacacttcagccaggggctgcactgccaccctgggcaactttgccaaggccacctttgatgccatctccaagacctacagctacctgacccctgacctctggaaagagactgtgttcaccaagtctccttatcaggaattcactgaccatcttgtgaaaacccacaccagagtctctgttcagaggacccaggctccagctgtggctaccacataagggtt

SEQ ID NO: 1182 - DNA, 744 bp, Rattus norvegicus
ctcttcctgtctgtgccagaactgcgcgtggtccgcgccgatcgactgagaagcccggtttgcgctctcagaatgactgaatgggaaacagccacacccgcggtggcagagaccccggacatcaagctctttgggaaatggagcactgatgatgtgcagatcaacgatatttctctacaggattacattgctgtgaaggagaagtatgccaagtacctgccccacagtgcaggacggtatgctgccaacggtttccgcaaagcacagtgtcccatcgtggagcgccttactaactccatgatgatgcacggtcgtaacaacggcaagaagctcatgactgtacgaattgtcaagcatgcctttgagatcatccacctgctcactggtgagaaccctctgcaggtcctggtgaatgctatcatcaacagtggcccccgagaagactcaacacgcattgggcgggctggaacagtgagacggcaggctgtggatgtatccccacttcgccgagtgaatcaggccatctggctgctgtgcacgggggctcgtgaggctgctttccggaacatcaagaccatcgctgagtgccttgcagatgagctcattaatgctcgcaagggctcctccaactcctatgctatcaagaagaaagatgaactggagcgtgtggccaagtctaaccgctgatttcccagctgctgcctaataaattgtgtgccctttgggacagttacatcaaaaaaa

SEQ ID NO: 1183 - DNA, 1302 bp, Rattus norvegicus
atggtagagatgctgccaactgtcgttgcgctggtcctggcagtgtccgtggttgccaaggatggcccctgtggattacgattcaggcagaaccctcaagcaggtatccggattgtcggagggcagacttcgtcgcgctgggcctggccctggatggtcagtttacagatcttcacgtcccataacagccgtaggtatcacgcctgcggaggcagcctactgaactcccactgggtgctcacggctgctcactgcttcgataacaaaaagagaaaagtctatgactggagactggtttttggagcccatgaaattgaatacggaagaaacaagccagtgaaagagccccagcaggaaagatacgtgcagaaaattgtcatccacgagaaatacaacgctgtgaccgaggggaacgacattgccctcttgaaagtcactcctcctgttacatgtggggacttcgttgggcctggctgcctacctcattttaagtctggtcctcccagaatcccccacacctgctacgtgactgggtggggatacataaaagataacgcccccagaccatcacctgtcctgatggaggcccgagtggatctcattgacctcgacctgtgtaactccacccagtggtacaatgggcgtgtcacatcaactaatgtgtgcgcagggtatcctgaaggcaagattgacacctgccagggggacagtggtgggcctctcatgtgcagagacacgcgtcgacagcccctttgtgatcgtggggatcacgagctggggggtaggctgtgccgtgctaagcgtcctggagtctacacagccacctgggactacctggactggattgcttccaagatcggccctaccgccttgcacttgattcagccggccacccctcacccacctacaacccagcaaccggtcatctctttccaccctccttcgactccaccctccttggtacttccaacacctgtctcctcggccgctttacctacgccgcctcggcctctgctccatcagccgtcttcagtccatacctcctcagctccagtcatacctctactctccctgctcaccccagtccagcctgtgtcctttacccttgctgcgtaccacacaaggcaccacacaacgctgtcttttgcttcggcgttacagcatctcatagaggccctgaagatgagaacttaccctataaaatatccctcccggtacagtggacctgtgaactaccagcaccgcttctccacgttcgagcccctttccaacaaacccagtgagcccctcctccattcctga

SEQ ID NO: 1184 - DNA, 1494 bp, Rattus norvegicus
ttccgctcgcgctcccccgccgccatgtcggctaccatcgagcgggagttcgaggaactggatgctcagtgtcgctggcagccgttatacttggaaattcgaaatgaatcccatgactatcctcatagagtggccaagtttccagaaaacagaaatcgaaacagatacagagatgtaagcccatatgatcacagtcgtgttaaactgcagagtgctgaaaatgattatattaatgccagcttagttgacatagaagaggcacaaagaagttacatcttaacacagggcccacttcctaacacgtgctgccatttctggctcatggtgtggcagcaaaagaccagagcagttgtcatgctaaaccgaactgtagagaaagaatcggttaaatgtgcacagtactggccaacggatgaccgagagatggtgtttaaggaaacaggattcagcgtgaagctcttatctgaagatgtgaaatcatattatacagtacatctactacagttagaaaatatcaatagtggtgaaaccagaaccatatctcactttcattataccacctggccagattttggcgttccggagtcaccagcttcattcctaaatttcttgtttaaagttagagaatctggttctttgaaccctgaccatgggcctgcagtgatccattgcagtgcaggcatcgggcgttctggcaccttctctcttgtagatacctgtctcgttctgatggagaaaggagaggatgttaatgtgaaacaaatattactgagtatgagaaagtatcgaatgggactcattcagactccggaccagctcagattctcctacatggccataatagaaggagcaaagtatacaaaaggagattcaaatatacagaacagaacaatgactgagaagtacaacgggaagagaatagggtcagaagatgaaaagttaacaggactttcttctaaggttccagatactgtggaagagagcagtgagagtattctccggaaacgcattcgagaggatagaaaggctacaaccgctcagaaggtgcagcagatgagacagaggctaaatgaaactgaacggaaaaggaaaaggccaagattgacagacacctaaatgttcatgacttgagactattctgcagctataaattttgaacctttgatgtgcaaagcaagacctgaagcccactccggaaactaaagtgaggcttgctaaccctgtagattgcctcacaagttgtctgtttacaaagtaagctttacatccaggggatgaagaacgccaccagcagaagacttgcaaaccctttaatttgacgtattgttttttaacatgtgtatgaattgtagaaagatgtaaagaaaataaaattaggagagactactttgtattgtactgccattcctaatgtatttttatactttttggcagcattaaatatttttattaaatagacaaaaaaaaaaaaaaaaaaaaaaaaaaaaaaaaaaa

SEQ ID NO: 1185 - DNA, 2740 bp, Rattus norvegicus
ggcgacagccgcgcggaacgcagagcggcgggagaggagctcgggctcctggtctctgctgccgtcatggctaccgtggacctggagaagttgcggatgtcgggggctggcaaggccatcggagtgctgacaagcggcggtgacgcgcaaggtatgaatgctgctgtcagggctgtgactcgtatgggcatatatgtgggggccaaagtcttcctcatctacgagggctacgagggcctcgtggaaggaggcgagaacatcaagccagccaactggctcagtgtctccaacatcatccagctgggcggcaccatcattggcagtgcccgctgtaaggccttcactacgagggaagggcgcctggcagcggcctacaatctgctccaacacggcatcaccaacctgtgtgtcatcggtggggatggcagcctcacgggggccaacatcttccgcaacgagtggggcagcttgctggaggaactggtgaaggaaggcaagatctcagagtccacagctcagaactacgcacacttgagcatcgccggtctggtgggctccatcgacaacgacttctgcggcaccgacatgaccatcggcacggactcggccctgcaccggatcatggaggtcatcgacgccatcaccaccactgcccagagccaccagaggacctttgtgttggaggtgatgggacggcactgcgggtacctggcgctggtgtctgcgctggcctccggggctgattggctgttcatccctgaagcgcccccggaggatggctgggagaacttcatgtgtgagaggctgggggagactcggagccgggggtctcgactgaacatcatcatcatcgcggagggtgccatcgaccggcatggaaagcctatctcatccagctacgtgaaagacctggtggttcagaggctgggcttcgatacacgagtgaccgtgctgggccacgtacagcgaggagggacaccctcggcctttgaccgagtcctgagtagcaagatgggtatggaggccgtgatggcgctgctggaggccacgccggacacgccggcctgcgtggtcagcctctccgggaatcagtctgtgcggctgcctctcatggagtgtgtgcaagtgacgaaggatgtgcagaaggccatggatgagaagaggtttgacgaggccatccagctccgtggcaggagcttcgagaacaactggaaaatttacaagctcctcgcccaccagaaggtgtctaaggagaagtccaacttctccctggccatcctgaatgtgggagctccagcggccggcatgaacgcagccgtgcgctccgcggtacgcactggcatctccgagggacacacagtgtacgttgtgcatgatggctttgagggcctggccaagggtcaggtgcaagaagtgggctggcatgatgtggcaggttggctaggacgtggtggctcaatgctggggaccaagaggaccctgcccaagccccacctggaggccattgtagaaaatctccgtacctacaacattcatgccctgttggtgatcggtggctttgaggcctacgagggtgtgctgcagctggtggaggctagggggcgctacgaggaactctgtatcgtcatgtgcgtcatcccagccaccatcagcaacaatgtccctggcactgacttcagcctgggctcggacacggccgtcaacgctgcaatggagagttgtgaccgcatcaaacaatcggcctcggggacaaagcggcgtgtgttcattgtagagaccatggggggctactgtggctacctggccactgtgacaggcattgctgtgggcgccgatgccgcctacgtctttgaggaccctttcaacatccacgacttgaaggccaatgtggagcatatgacagagaagatgaagacagacatccagaggggcctggtgctccggaacgagaagtgtcacgaacactacaccacggaattcctatacaacctatactcctcggaaggcagaggtgtgttcgactgcaggaccaacgtgctgggccacctgcagcagggtggcgctccaacccccttcgaccggaactatgggaccaaactgggggtgaaggccatgttgtggatgtcggagaagctgcgtgatgtctaccgcaaagggcgggtgtttgccaatgctccggactcagcctgtgtgatcggcctgaggaagaaggtggtggccttcagttcggtcacagaactcaagaaagagacagattttgagcaccgtatgccgcgggagcagtggtggctgaatctgcggctgatgctgaagatgttggcacactaccgcatcagcatggccgactacgtgtctggggagctggagcacgtcacacgccgcaccttgagcatagacaagggtttctgagcttaccgatcaccctcgttcctgctctcccggactctctctccctcccagtgctagccacagatcccagcactaaggggaactcacatggaactcggagcctgtggttggttgaaggatttgggggtctactgtgctgctctgggactcctcccttagccacccccacccccccaccccctcagaacagagcacctgtggggcccttacattccagttctggctgggcagacccacatcaccactccctcactggtcagctggctgcctcaccacacggccgaaaagagcctcatggtttttttttttagaaataaagtcacctgtttag

SEQ ID NO: 1186 - DNA, 497 bp, Rattus norvegicus
aaagttgctgctaggcgctcgaaagcgagcacctcatctcagagatctggagcggccgcgcttgcggagctgtcaccatgcctctggctagagatctattacacccttccttggaagaggaaaagaaaaaacataagaagaaacggctggttcagagcccaaattcttacttcatggatgtgaaatgtccaggttgctacaagattactacagttttcagccatgctcagacagtggttctttgtgtgggttgttcaaccgtgctgtgccagcccacaggagggaaagccaggctcacagaaggctgttcatttagaagaaagcaacactaatcatctatacaagttcctgaattcgtgtttttcacagaaagccttatcaactttagttactctaccaagacaatgtaattattgtttgattttataaagtctacaacaatgatctcctattttggtgtcagtttttcaataaagttttacttatgaacaagttca

SEQ ID NO: 1187 - DNA, 1543 bp, Rattus norvegicus
cgtagaaactcaccattccctgcccaaccccagccccacacccagagcaatcaacagttccagatttgcgccagatcctgctccaaatccggtagccgcatcccaagccatggctggtcccttctcccgtctgctgtctgcccgccccggactcaagctcctggctttggctggagctgggtctctcgccgccgggattctgctccgtccggaatctgtacgagcggccaccggtgaacggaggagactgtatcccccgagcgctgagtacccagacctccgaaagcacaacaactgcatggccagtcacctgaccccagcagtctatgcacggctctgcgacaagaccacacccactggctggacactagatcagtgcatccagactggagtggacaaccctggccaccccttcatcaagactgtgggcatggtggctggagatgaggagacctatgaggtatttgccgaactgtttgaccctgtgatccaagagcggcataatggatatgaccctagaacaatgaagcacaccactgaccttgatgccagcaaaatccgttctggctactttgatgagaggtacgtattgtcctcaagagtcagaactggccgaagtatcaggggactcagtctccctccagcctgcactcgggcagagcgacgagaggtggagcgtgttgtggtggacgcgctgagtggcctgaagggcgacctggctggacggtactacaggctcagtgagatgacagaggctgagcagcagcagcttattgacgaccatttcctgtttgataaacctgtgtccccattgctgacagcagcaggcatggctcgagactggccagatgcccgaggaatctggcacaacaatgagaagagtttcttgatctgggtgaatgaggaggaccacacacgggtcatctctatggagaaaggcggcaacatgaagagagtgtttgaaagattctgccggggcctcaaaaaggtggagaagctgatccaggaacgaggctgggagttcatgtggaatgagcgtttaggatacatcttgacctgtccatctaacctgggcactggacttcgggcaggagtacacgtcaaactgccactgctaagcaaagatagccgcttcccaaagatcctggagaacctaaggctgcaaaagcgtgggactggaggagtggacacgcctgccacagcggatgtctttgacatctctaatctggatcgacttggcaagtcagaggtggagctggtgcagctggtcatcgatggggtgaactatttgattgactgtgaacggcgtctggagaaaggacaggatattcgaatccctccacctcttgtccacggcaaacattaactccccgtccccagcagctgaatcaagattccccaggacttctgcatatttaacagtggcccattctacttgccaaggacctgcctctcaatccctgtcctagtaaagactccacgttctgttgcaaaaaaaaaaaaaaataaagttcctatttctctgcaaaaaaaaaaaaaaaaa

SEQ ID NO: 1188 - DNA, 4592 bp, Rattus norvegicus
agacagaggcgacagaaactctgcagccagctcttgcccccgaggagctcaggttcctgcaggagtcattttagcttagtcttctgaaggacacagataccatggaagagaacacgtttggggttcagcagatccaacccaatgtaatttctgttcgtctcttcaaacgcaaagtgggaggtctgggcttcctggtgaaggaacgggtcagcaagcctcccgtgatcatctcagacctgattcgaggaggtgctgcggagcagagcggccttatccaagctggagacatcattctcgcagtcaacgatcggcccttggtagacctcagctatgacagtgccctggaggttctcaggggcattgcctctgagacccacgtggtcctcattctgaggggccctgagggcttcactacacatctggagaccaccttcacaggggatggaacccccaagaccatccgggtgacccagcccctcggtcctcccaccaaagccgtcgatctgtctcaccagccttcagccagcaaagaccagtcattagcagtagacagagtcacaggtctgggtaatggccctcagcatgcccaaggccatgggcagggagctggctcagtctcccaagctaatggtgtggccattgaccccacgatgaaaagcaccaaggccaacctccaggacatcggggaacatgatgaactgctcaaagagatagaacctgtgctgagcatcctcaacagtgggagcaaagccaccaacagagggggaccagccaaagcagagatgaaagacacaggaatccaggtggacagagacctcgatggcaaatcgcacaaagctccgcccctgggcggggacaatgaccgcgtcttcaatgacctgtgggggaaggacaacgttcctgtggtccttaacaacccgtattcagagaaggaacagtcccctacctcggggaaacagtctcccaccaagaacggcagcccttccaggtgcccccgtttcctcaaggtcaagaactgggagacggacgtggtcctcaccgacaccctgcacctgaagagcacactggaaacggggtgcacagagcacatttgcatgggctcgatcatgctgccttcccagcacacgcggaagccagaagatgtccgcacaaaggaccagctcttccctctagccaaagaatttctcgaccaatactactcatccattaagagatttggctccaaggcccacatggacaggctggaggaggtgaacaaggagattgaaagcaccagcacctaccagctcaaggacaccgagctcatctatggcgccaagcatgcctggcggaacgcctctcgatgtgtgggcaggatccagtggtccaagctgcaggtgttcgatgcccgagactgcaccacagcccacggcatgttcaactacatctgtaaccatgtcaagtatgccaccaacaaagggaatctcaggtcggccatcacgatattccctcagaggactgacggcaaacatgacttccgagtgtggaactcgcagctcatccgctacgcgggctacaagcagccagatggctctaccttgggggatccagccaatgtgcagttcacggagatctgtatacagcagggctggaaagccccaagaggccgcttcgacgtgctgcctctcctgcttcaggccaatggcaatgaccctgagctcttccagatccccccagagctggtgctggaagtgcccatcaggcaccccaagttcgactggtttaaggacctggggctcaaatggtatggcctccccgctgtgtccaacatgctgctggagatcgggggcctggagttcagcgcctgtcccttcagcggctggtacatgggcacagagatcggcgtccgtgactactgtgacaactctcgatacaacatcctggaggaagtagccaagaagatggatttggacatgaggaagacctcgtccctctggaaggaccaagcactggtggagatcaacattgctgttctatatagcttccagagtgacaaggtgaccatcgttgaccaccactctgccacggagtccttcatcaaacacatggagaatgaataccgctgcagagggggctgccccgccgactgggtgtggattgtgcctcccatgtcgggcagcatcacccctgtcttccaccaggagatgctcaactatagactcaccccgtcctttgaataccagcctgatccatggaacacccacgtgtggaagggcaccaacgggacccccacgaagcggcgagctatcggctttaagaaattggcagaggccgtcaagttctcagccaagctaatggggcaggccatggccaagagggtcaaggcgaccattctctacgccacagagacaggcaaatcacaagcctatgccaagaccctgtgtgagatcttcaagcacgccttcgatgccaaggcaatgtccatggaggagtatgacatcgtgcacctggagcacgaagccctggtcttggtggtcaccagcacctttggcaatggagacccccctgagaacggggagaaattcggctgtgctttaatggagatgaggcaccccaactctgtgcaggaggagagaaagtacccggaacccttgcgtttctttccccgtaaagggccttccctctcccatgttgactctgaagcccacagtctggttgctgcccgtgacagccaacacaggagctacaaggtccgattcaacagcgtctcctcctattctgactcccgaaagtcatcgggcgacggacccgacctcagagacaactttgaaagtactggacccctggccaatgtgaggttctcagtgttcggcctcggctctcgggcgtacccccacttctgtgcctttgggcatgcggtggacaccctcctggaggaactgggaggggagaggattctgaagatgagggagggggatgagctttgcggacaggaagaagctttcaggacctgggccaagaaagtcttcaaggcagcctgtgatgtgttctgcgtgggggatgacgtcaacatcgagaaggcgaacaactccctcattagcaatgaccgaagctggaagaggaacaagttccgcctcacgtatgtggcggaagctccagatctgacccaaggtctttccaatgttcacaaaaaacgagtctcggctgctcgactcctcagccgccaaaacctgcaaagccctaagtccagccgatcgaccatcttcgtgcgtctccacaccaacgggaatcaggagctgcagtaccagccaggggaccacctgggtgtcttccccggcaaccacgaggacctcgtgaatgcactcattgaacggctggaggatgcaccgcctgccaaccacgtggtgaaggtggagatgctggaggagaggaacactgctctgggtgtcatcagtaattggaaggatgaatctcgcctcccaccctgcaccatcttccaggccttcaagtactacctggacatcaccacgccgcccacgcccctgcagctgcagcagttcgcctctctggccactaatgagaaagagaagcagcggttgctggtcctcagcaaggggctccaggaatatgaggagtggaagtggggcaagaaccccacaatggtggaggtgctggaggagttcccgtccatccagatgccggctacacttctcctcactcagctgtcgctgctgcagcctcgctactactccatcagctcctctccagacatgtaccccgacgaggtgcacctcactgtggccatcgtctcctaccacacccgagacggagaaggaccagtccaccacggggtgtgctcctcctggctcaacagaatacaggctgacgatgtagtcccctgcttcgtgagaggtgcccctagcttccacctgcctcgaaacccccaggtgccttgcatcctggttggcccaggcactggcatcgcacccttccgaagcttctggcaacagcgacaatttgacatccaacacaaaggaatgaatccgtgccccatggttctggtcttcgggtgtcgacaatccaagatagatcatatctacagagaggagaccctgcaggccaagaacaagggcgtcttcagagagctgtacactgtctattcccgggaaccggacaggccaaagaaatatgtacaggacgtgctgcaggaacagctggctgagtctgtgtaccgcgccctgaaggagcaaggaggccacatttatgtctgtggggacgttaccatggccgccgatgtcctcaaagccatccagcgcataatgacccagcaggggaaactctcagaggaggacgctggtgtattcatcagcaggctgagggatgacaaccggtaccacgaggacatctttggagtcaccctcagaacgtatgaagtgaccaaccgccttagatctgagtccatcgccttcatcgaagagagcaaaaaagacgcagatgaggttttcagctcctaactggatcctcctgcccccgtgcgtgcgatgtggcggctgccccaagtgcccaagtaagggcggccgcaggttgactaaattcggacacacacggctgaa

SEQ ID NO: 1189 - DNA, 631 bp, Rattus norvegicus
ctgttagcggccagaggtgacctgtgaagatggttcgctactcccttgacccagaaaaccccacgaaatcatgcaagtcaagaggctcaaaccttcgtgttcactttaagaacacccgggaaactgcccaggccatcaagggtatgcatatccgcaaagccaccaagtatctgaaggatgtcactttaaagaagcagtgtgtgccattccggcggtataacggtggagttggtaggtgcgcccaggccaaacagtggggctggacacagggacggtggccaaaaaagagtgctgaatttttgctgcacatgcttaaaaatgcagagagtaatgctgaacttaagggtttggatgtagactctctggtcattgaacacatccaggtgaacaaggctcctaagatgcgcagacggacctacagagctcacggccggattaacccatacatgagctccccctgccacatcgaaatgatcctcactgagaaggaacagattgttccaaagccagaagaggaggttgcacagaagaaaaagatatcccagaagaaattgaagaaacaaaagctcatggcacgggaataaattcagcataaataaatgcggataaagtaaaaaaaaaaaaaaaaaaa

SEQ ID NO: 1190 - DNA, 2554 bp, Rattus norvegicus
atgtctgttccatcatccctgagccagtcggccattaatgctaacagccacggaggccctgcactcagcttccccttccccttgcatgctgcccataaccagctgctcaacgccaagctgcaagccacagctgtggtacccaaggaccttcgaagtgccatgggagagggtagtgtgcctgaaccaggccctgccaatgccaagtggttaaaggaaggccagaaccagcttcggagggctgccacagcccatcgagaccagaaccgaaatgtgaccttgaccttggcggaggaggccagccaggaggctgagacagcacctttgggtcccaaaggcttaatgcatctatactctgagctggagctctcggcccacaatgcagccaaccgagggcttcatggatccgccttgatcatcaacacccagggactgggaccagatgaaggagaggagaaggcagcaggagaagttgaggaggaggatgaagatgaggaggaagaggatgaggaggaggaggacttgtcttctcctcaagggctacctgagcctctggagaatgtggaagtcccctctggaccccaggtcctcacagatggcccccgggaacatagcaagagtgctagcctcctatttggcatgcgaaacagtgcagccagtgacgaggactcaagctgggccaccttatcgcagggcagcccctcctatggctctccggaggacacagattccttctggaaccccaacgctttcgagacggattccgatctaccggctggatggatgagggtccaagacacctcagggacctactactggcacatcccaacagggaccacccagtgggaacccccaggccgggcctccccatcacaggggaacagtccccaagaagagtcccagctcacctggactggctttgctcaccaagaaggctttgaggaaggagagttttggaaggatgaacctagtgaagaggccccaatggagttgggactgaaggaccctgaggaggggacattgcccttctcagctcagagcctcagcccagagccagtgccccaggaggaggagaatctgccccaacggaacgccaatccagggatcaagtgtttcgctgtgcgctccctaggctgggtagagatgactgaggaggagctggccccaggacgcagcagtgtggcagtcaacaattgtatccgccagctctcctaccacaaaaacaatctacatgatccgatgtctggaggctggggagagggaaaggatctgctgctccagctggaggatgagacgctaaagttggtggagccacagaaccagacactgctgcatgcccagcccatcgtcagcattcgcgtgtggggcgttgggcgggacagtggaagagagagggactttgcctacgtagctcgagataagctgacccagatgctcaagtgccacgtgtttcgctgtgaggcacctgccaagaacatcgccaccagcctgcatgagatctgctccaagatcatgtctgaacggcgcaatgctcgctgcttggtaaatggactctccctggaccactctaaacttgtggatgtccctttccaagtggaattcccagcaccaaagaatgaactggtgcagaagtttcaagtctattacctagggaacgtgcctgtggctaaacccgttggggtagatgtgattaatggagccctggagtcagtcctgtcttccagtagtcgtgagcagtggaccccaagtcacgtcagcgtggcccctgccaccctcaccatcttgcaccagcagacagaagcagtgctgggggagtgtcgagtgcggttcctctccttcctggctgtgggcagagatgtgcacacgttcgcattcatcatggctgccggcccagcctccttctgctgtcacatgttttggtgcgagcccaatgctgccagtctctcggaggctgtgcaggctgcatgcatgctccgctaccagaagtgtctggatgctcgttcccagacctccacctcctgcctcccagcaccccctgcggagtcagttgcgagacgtgtagggtggactgtccgcaggggtgttcagtctctgtggggttccctcaagcccaaacgtctaggatcccagaccccatgaagagctcccatcctccctctacctgcttgttttgggccccagggaactcaagggtttggggcaggtaggggctgtggatgttcttcctacaccccatgtcccccgggctgcccctcctcagtagctggggttccctacctaggggctgggagagagaaattgaattccttcacagaagtcattacactggactgatgacatcggggccgagaagcaaagccagccttgggctctccatccccagtgtttgaggtggagcaggaggaactggtccaagccaggccccatcctcaaaggcccaataagggcaggaggggactggtctcggcatggatcccctgtcccctgttctgcggacacctccactgtactgatatcactaataaagtctgtctgtcgctgaaaaaaaaaaaaaaaa

SEQ ID NO: 1191 - DNA, 3021 bp, Rattus norvegicus
cagagcctggcgctgaggaaggaatctggcagtcgagagctgactccagccgacggaacctgcagcccttgctccggacagcagcgcgccgggcaggagtccgggatagcgaagcgcagagcaatcagcagagcctgcccggagctccgtgcaaccggcaactccgacccacatagcccgccgagctcccgccgccggtccgggcagcatgagacgtgcggcgctctggctttggctctgcgcgctggcgctgcgcctgcagcctgccctcccgcaaattgtcaccgcaaatgtgcctcctgaagaccaagatggctctggggacgactcagacaacttctctggctcaggcacaggtgctttgccagatatgactttgtcacggcagacaccttccacttggaaggatgtgtggctcctgacagctacacccacagctccagaacccaccagcagggataccgaggccaccctcacctctatcctgccggctggagagaagcctgaggagggagagcccgtggcccacgtggaagcagagcctgacttcactgctcgggacaaggagaaggaggccaccaccaggcctagggagaccacacagctcccagtcacccaacaggcctcaacagcagccagagccaccacggcccaggcatctgtcacgtctcatccccacggggatgtgcaacctggcctccacgagaccttggctcccacagcacccggccaacctgaccatcagcctccaagtgtggaggatggaggcacttctgtcatcaaagaggttgtggaggatgaaactaccaatcagcttcctgcaggagagggctctggagaacaagacttcacctttgaaacatctggggagaacacagctgtggctggcgtcgagcctgaccttcggaatcagtccccagtggatgaaggagccacaggtgcttctcagggccttttggacaggaaggaagtgctgggaggtgtcattgctggaggcctggtgggcctcatctttgctgtgtgcctggtggctttcatgctataccggatgaagaagaaggacgaaggcagttactccttggaggagcccaaacaagccaatggcggtgcctaccagaaacccaccaagcaggaagagttctacgcctgatggggaaatagttctccccccacaacccctgccactcactaggctcccatttgcctcttctgtgaaaaacttcaagccctggcctccctaccgctgtgccgtctcctctgcacccagacccttctgcccgagcggtctcagggtgtgctgggaattccttctcctctgacttctgctagaagcttgggtgcagagggtttcttgcattttgtctttctaccacagccacgcctgttgtccactcttctgacttggcttctccaaatgggaggagactcagctctggacagaaagggaacccaactgctttggacctagatggcctattgtgactggaggatcctgaggacaggagaggggcttcaacagacacgccatagcacttacccatagagaccattagggttggctgtgctgtggtagggaaggagtccagggctccttggaattcacttctcattgtggggaggtctactttagacaacttggttttgcacatgtttcctctaatttttctgttttagagccccagcagaccttacttctggggtaaggcaagtcagttgactggtgtccccacctcgcttccctaatctacattcgggagaccgcatcggggttaaataagacttttcattttcgtttttgtttttaacctagaagaaccaaatccggacaccaaaacgtaggcttagtttgtgtgttgtctctgagtttgtcgctcatgcgtgcaacagggtatggactatctgtttggtgccccatttttggtggcccataagtaggctggctagcccaggatgccatggagtagccacctcttgaccagtcatgcctgtgtgcatagactcagggccatggcctttgtgacattggaagagcctgtgtgagaacttcctcctagattagtctagggatggaggggaggagactgtatagtttgggaggaggggtgacaagggtgtccaagactctcccacctttggtactaactctggtcaccctttctcctggaagttgacaagacacatcttgagtatggctggcactggctcctccatcaagaaccaagttcaccttcagctcctgtggccctgttcccaggctggagtcagaaatgtttcccaaagagtgagagtcttttgcttttggcaaaacgctacttaatccaatgggttctgtacagtagattttgcagatgtaataaactttaatataaaggagtcctatgaactctactgtttctgcttcttattctctgggctggtggtacagacgtagccagcctctgcccaaacccgggtagctcagagaagcttggctcaaggctacgtgcctccagtcctctgaggggtaggatcctggatccagggttccgctggtttgttgttttgttttgtttttcttttggctaaacttcttttggaagttggtaggttcagccaaggttctgcaggacctgacgtctgttcttctagatggtttaagtaatcgggactctagcacatcttgacctggggtcactacagctaagcttgctttgcagagcagatacctgggacagccttcatccctcatggttgctgggacacttctgaggactccttgcttacttagctcagcgatgttccagctgctggctaggctgctcagtggcgcggctagacaaaagatctgtgccctgtgtttcatcccagaatttgctgccagatcgtacggctggatgtgatgtggggtggggtggggtcagatctgagacagcactcaactgagggcttgtgagacagtgtccaagtctcaggctggggccattcatataattgcaataaatggtacgtgtccatttggacagcagacaaaaaaaaaaaaaa

SEQ ID NO: 1192 - DNA, 843 bp, Rattus norvegicus
ctcttttggccttgcttgccggcagactcgccgccatgggccgtgtgatccgaggccagaggaaaggtgccggttctgtgtttcgtgcgcacgtgaagcaccgtaagggagccgcgcgtctgcgtgctgtggacttcgcggagcgacacggctacattaaaggcatcgtaaaggacatcattcatgaccctggccgcggcgctcccctcgcgaaagtagtctttcgtgatccctatcgattcaagaagcggacagagctgttcattgccgcagagggaatccacactggacagtttgtgtactgcggcaagaaggcccagctgaatattggcaatgttttgcccgtgggcaccatgcctgagggtactatcgtgtgttgtctggaggagaagcctggggacaggggcaagctggcacgagcctccgggaactatgctacagtcatctcccacaacccagagaccaagaagacccgagtgaagctgccttcagggtccaagaaggtcatttcctctgctaaccgagctgttgttggtgtcgtggctggcgggggcagaattgacaagcctatcttaaaggctggccgtgcctaccataagtacaaggcaaagaggaactgctggccacgtgtgcggggtgttgccatgaatcctgtggagcatccctttggcggtggtaaccaccagcacattggcaagccttccactatccgaagagatgccccagctgggcgcaaagtgggtctcattgctgctcgccggactggacggctacgtggaaccaaaactgtacaggagaaggagaactagagttcaggagctaataaagtatgtgctttggcta

SEQ ID NO: 1193 - DNA, 1320 bp, Rattus norvegicus
gggctctatcggcggcgtgtggcggcgagatgtctcacaggaaattctcagctcctaggcatgggtccttgggcttcttgcctcggaagcgcagcagccggcatcgtggaaaagtgaagagcttccctaaggatgacccttccaagcctgttcacctcacagccttcctagggtacaaggctggcatgacccacattgtccgggaagttgaccggccaggatctaaggtgaataagaaagaagttgtggaggctgtgaccattgtggaaaccccacccatggtggttgtgggtattgtgggatatgtagaaaccccacgaggcctccggaccttcaagactgtatttgctgagcacatcagcgatgagtgtaaaaggcgtttctataagaattggcacaaatctaagaagaaggcttttaccaagtactgtaagaaatggcaagatgacacaggcaagaagcagctggagaaggacttcaacagcatgaagaagtactgccaggtcatccgcataattgctcacactcagatgcgcctgcttcctctgcgccagaagaaggcacacttgatggagatccaggtgaatgggggcactgtagctgagaagctagactgggcccgagagaggctggagcagcaggtccctgtgaaccaggtgtttgggcaagatgagatgattgacgtcatcggcgtgacaaagggcaaaggctacaaaggggtgaccagtcgttggcatacaaagaagctgccccgaaagacccacagaggtctgcgcaaagttgcttgtattggagcttggcatcctgcccgtgtagccttctctgtggctcgagctgggcagaaaggctaccatcaccgaacagagatcaacaagaagatttacaagattggtcaaggctacctcatcaaggatggtaagctgatcaagaacaatgcatctactgactacgacctgtctgacaagagcatcaacccactgggtggctttgtccattatggtgaggtgaccaatgacttcatcatgctcaaaggctgtgtggtgggaaccaagaagcgagtgcttactctccggaagtccttgctggtccagaccaagcgtcgggctcttgagaagattgacctgaagttcattgacaccacctccaaattcggacatggtcgcttccagaccatggaggaaaagaaagcattcatgggaccgctcaagaaagatcgcattgccaaggaggaaggtgcctgatgccaggagtactttgtgcagctggtggggtctcatcaataaaatatttccaaaaaaaaaaaaaaaaaaaaaaaaaaaa

SEQ ID NO: 1194 - DNA, 410 bp, Rattus norvegicus
atgaaatccttgagtgtttcactagtgctcctgtggctccagctaaacggggtgagcagccagcagaaggtgcagcagagcccagaatccctcattgtctcagagggagccaaagcctctttcaactgcactttcagtgatagtacttctgattatttctggtggttcagacagtattctgggaaaagccccaaggccctgatgtccatcttctccaatggtgacaagcaagaaggcagattcacagttcacctcaataaaaccagcctgcatgtttccctgcacatcaatgactcccaacccactgactctgctgtctacctctgtgcagtgagtgcgaaaataatgcaggtgccaagctcacgtttggagggggaacaaggttgacggtcaaaccccatgtcacagac

SEQ ID NO: 1195 - DNA, 466 bp, Rattus norvegicus
aggaaagacagaatcctactagaggccagaaagaatgttccagacatgggtggaaggccctcactcccgactgacttcaatacgcctgaaggtagggagtgctccatgtctgcccccaggctccaagggtgggtctcctagggcctggaaaatgccccaccaatctggctaagataaggaaagggtatgaagagaaagttacagaaatttgaagggttaagctaagttgctgagagttagtataagttacagagaaagtaaggttaaacaaagagaaagagaaaagaaggtaaaaagagcaggaagctagggaagaaaagagactaaaagaagaggaagctagagagctaaagagagataaaagacaagagaggaacatatactggccacagtagttagggaacctaggaagacagtacctggcaacagaagagaattcctggctaaagatcagtgtgcctaatgc

SEQ ID NO: 1196 - DNA, 1303 bp, Rattus norvegicus
gtaacattacatatgttagtactcctaacacttcttgggactgtgcctcagggatcacaacctatataagtttagaagttctgaaagacagtcatgaccttggtatataggttcagatagtgtccagattggaatcctgatgctaaagacttagtaagagacaaaaaaaaggagttgagaattacttagggctagggctatctaggtgctacaagggcagcacaaggacatctgctgttgccctacaatacaaggcttatagagaattcagaactgccattgactcagatataaaaagagtaaaagactttttagctgacctccaagaatacctaacttccctctcagaggtagtccttcaaaataagaaaagattagacctgatattccttaaagaaggagtctgtgtgctatactgaaagaaaaatgttgcttctatacagaccattcaggagtaattaaagactccataaataaacttaaaaaaaggttagacaaaagacagacagacagaaaaacacatcagagatagttcgagagctagtttagtagatctccctggatgactaccctactctctgctacagctgggccattattaataattttcttggttttagtttttggctcctgcgtgacaaacaggttaattgcttttgttaaaaatcgagtgggtgctgtgcggttgatggttctgagacaacagtaccagtcagttaggacaactggtgagaccaaataatacttgatatcaaaattctaagattagaattatttaataggagaagacaggaatgaaaagaaaattatataaattctaggtttaaaaatataaaaattaaaaaaataaaccccaaaaggccacagacccagggctaagcctgcagccaagactagcaggccataaagataaaggagcacaggaaacactgttcaggcaggactgacaagccataaaaaaaggaatgcaggaaccagcctgagttaatgagactgattcatgggacgtctggcaggaagacatctcccccagctcactcagggccatatttcaactaggtgtcctccggcccctgataagcccctgacttctagcacgttactctttctgctttgttctcactgctatgtttgaatgagccaattgtatgtaaccacgccaaaacccctagccttctctatataaccctctgacttttgagtttcggggccgacacctctgtctcctgcgtgggatgcgtgtcggcccggagatctctgtaataggtctccgtaataaacctcgcctttgcttattacatcc

SEQ ID NO: 1197 - DNA, 1798 bp, Rattus norvegicus
cgaaccgactgtcggtctcttctccatggccattcgcgccaccatggatctctctgccatctacgagagccttatgtcgatgagccatgacctgtcacccgaccacggaggaactgagtcctccggaggactttggaacataaactcatcggactccatcccatctggggtcacctctcgcctgactggccgctccactagcctggtggagggccgaagctgcagctgggtacccccaccccctggtttcgcacccttggctccccgcccgggccctgagctgtcaccctcacctacttcgcctactgcaactcccaccacctcctctcgatacaagactgagctctgtcggacctactcagagagcgggcgttgtcgctatggggccaagtgccagtttgcccacggcccgggtgaactgcgccaagccaatcgccaccccaagtacaaaacggaactctgccacaagttctacctccagggccgctgcccctacggctctcgatgccacttcatccacaaccctaccgaggacctggctctccctggccagccccatgtgctccgacaaagcatcagcttctcaggcttgccttcaggccgcagaacctcaccaccacctccaggcttctctggcccttccctgtcctcttgctccttttcgccttccagctccccaccaccgcctggggaccttccactttccccttctgccttctctgctgcccctgggacccctgtgtctcgaagagaccctaccccagcctgttgtccctcctgccgaaggtctactacccctagcaccatctgggggcccttgggtggtctggctcggagcccatctgcacactctctgggatccgaccctgatgattacgccagcagcggcagcagcctgggtgggtcagactcgcctgtctttgaggccggggtgtttgggcctcctcagccccctgcacccccaaggcgtcttcccatcttcaatcgcatctctgtctctgagtgacaagtgcctgcccagtgtggatcagctagatctcaaagaagagggagggaactgctcgttgctgtggggacctggggggactcctctaagtccctcctcctggacattccaagttgcattaacccattcccctggtgctgggctagggcaggtccctagtttgcaaattcagtgtttgggtggatccgttcctagggtacctgagatgtagcatgtttgaggggtacagttgacagttgatcttccaggtctcaagtcttatgttgtttctgagataggggattattacggtaccccaggctggctttgaactcaatataatcctgccttagccttttccaagttctggggttacaggtatgcaccagcccctcggaaactctggtctcctggaatcttaagtgctgtgaagagccggctcccacaatactatcctaatttttactagaccccgaagttcagtgtccggtggttgtagcctctcctgagaatcctggtgctcaaatttccctcccaaagcaaatagccaaagccattgccaaatcccttttcccccacgcccctgccccaaccaatggacccttttatttatgacgactttatttattgtaataagattttatagtatttatatatattgggtcgtctactccgtttttctttttgtaatgttaaaactgatactgtattaagtatatactataatatattaagtaatatattgttaccgtacaagtctatttttgtgggtttttttggaatttttaaataaaatcttgagtgtgaaaaaaa

SEQ ID NO: 1198 - DNA, 1449 bp, Rattus norvegicus
gggcggcaccgagtgacagcgctgagaggcttaagatctccggagccgctcgccatggctggcccgcagcagcagcccccttacctgcacctggccgagctgactgcatcccagttcctggaaatctggaagcactttgatgctgacggaaatgggtacattgaaggtaaagagctagaaaacttcttccaggagctggagaaggcaaggaaaggttctggcatgatgtccaagagcgacaattttggagagaagatgaaggagttcatgcagaagtatgataagaactcagatgggaaaattgagatggcagagctggcgcagatcctgccaaccgaagagaatttccttttgtgcttcaggcagcacgtgggctccagcgctgagtttatggaggcttggcggaagtatgacacagacagaagtggctacatcgaagcaaatgagctcaagggatttctgtccgacctcctgaagaaggccaaccgtccctatgatgaacctaagctccaggagtacacccaaaccatactacgcatgtttgacttaaatggagacggcaaattgggtctctcagagatgtctagactcttgcctgtacaagaaaacttcctgctgaaatttcagggtatgaagctgacctcagaagagttcaatgccatcttcacattctatgacaaggatggaagcggctacatcgatgagaacgagctggacgccctcctgaaggatctgtatgagaagaacaagaaggagatgaatatccagcagctcaccacctacaggaagagcgtcatgtccttggccgaggcagggaaactctacagaaaggacctggagattgtgctttgcagtgagccccccatgtaaaggggtgaagggacaggggctgcttctgcacctcccctaaaccctgccccccactgccctgactctcttgaaactccttcccagacctctccacccctgcaacctgcacacaccagcctgtggggcaggaaaggagagatggaaagagggtggctggtagcattcctttgagctgcaccagcccaaccctggcctgacagacagctgtgcctgtggtgggtgggtcacacggttggtgggtaggggcacaggtggggcttccctagtctctttgctgtgatgcatgagctcctcgctgtatgattagcttccgagtccaacagagtgcactccttcctcttgctgcaccagcctccttctccccaggccccccactgacccccgcaattccaggttctgtccaccggcttgctaatgatataactgtcttctcagagctactgtggagggtcattgccctcttcttgtgttcttgacttgtgtgttccttttattttggggtttccctgtcttctcgtttaccaaagaagagtttacagagaataaagtggaaatgtcctgccgtgaaaaaaaaaaaaa

SEQ ID NO: 1199 - DNA, 1684 bp, Rattus norvegicus
cgccggcgctcggaagtagaggcgcttctgtcgttgttcgtgaagccgtggtgactgcgggatcagaatctttgagtgtgagaaactttacagatagccacaatggctgaaaatggagataacgaaaaaatggctgctctggaggccaaaatctgtcatcaaattgagtattattttggagacttcaatttgccacgagacaagtttttaaaagaacagatcaaattggatgaaggctgggtacctttggaaacaatgataaaattcaacaggctaaaccgactgacaacagactttaatgtaatcgtgcaagcattgagcaaatctaaggcaaatctcatggaagtgagtgcagacaaaactaaaattagaagatcaccaagcagaccactccctgaagtgacggatgagtataagaatgatgtgaaaaatagatctgtttatattaaaggcttcccaactgatgccacccttgatgatataaaagaatggctagatgataaaggccaaatactgaatattcagatgagaagaacattgcacaaaacatttaaggggtcaatatttgctgtgtttgatagtattcagtctgcaaagaagtttgtggacacccccggccagaagtacaaagacactaatctgctaatactcttcaaggaagattactttgcaaaaaaaaatgaagaaagaaagcagagcaaagtggaagctaaattaaaagctaaacaagaacatgaaggacgacacaaaccaggaagtactgaaacaagagctctagaaggaaaaatgggatgcttactgaagttttcaggtgacttggatgaccagacctgtagagaagatttacacttccttttctcaaatcatggtgaaataaaatggattgactttgtcagaggagcaaaagagggaataattctcttcaaagaaaaggctaaggacgcacttgagaaagccagaagtgcaaataatggtaacctactgttaaggaacaaaaaagtgacttggaaagtactagaaggacatgcagaaaaagatgcaatgaaaaaaatcacagatgatcaacaagaatctctgaacaaatggaagtcaaaaggaggtcatgcagcccgcagatttaaaggaagtcatgtttttacagcagctcgcagatttaaaggaagagggaaaggtaatagacctgcttatgctggggcacccaaaggaagaggacagtttcaaggaaggaggacaagatttgatgatgatgatcatcgtcgtggaccagtgaaaagaggaagagacggaagagacagagaagaacccgcatcaaagcataagaaaagagagaatggtgctagagacaagtagtttatttagtaagcagtgtttttattccttagttaggttttaagctgctttttgtcttcagaagcttttaaaaagaaaagcgaattaggtccacttcaatgtccacctgtataaaaggaaaagttttttgttttacttgtctttttgttgttatccaaatgaaagttttttaaaatgtatagttctgtttgtgtttggatgattaaaatatgaaaaggaagattcttcctcttaattgcctttgtaatatgagaatgtattagtacagacttgtaaaatatatactgtataaaaaaaaaaaaaaaaaaaaaaaaaaaaaaaaaaaaaaaaaaaa

SEQ ID NO: 1200 - DNA, 3138 bp, Rattus norvegicus
agacgggtgacacaggttggaacaattggaagtctcattgtacaacatgcttcgactaagtctcccacccaatgtttcaatgggatttcgtctggtaactctggtggctctcttgtttacccatgttgaccatataactgcagatacagaggcagaaacaggaggaaatgaaaccactgaatgtactggctcatattactgtaagaaaggggtgattctgcccatttgggaaccccaagacccatcttttggggataaaattgctagagcaactgtgtattttgtggccatggtctacatgttcctcggagtttctattattgccgaccggtttatgtcctctatagaagtcatcacctctcaagaaaaggagattaccataaagaaaccaaatggagagaccaccaagactacagtgcgtatctggaatgagactgtgtccaacctgaccttgatggccctgggatcttccgctcctgagattctcctgtctgtcattgaagtgtgtggccataacttcaccgcaggggaccttggtcccagcaccattgtgggaagcgccgccttcaacatgttcatcatcatcgcgctttgtgtttacgtggtcccagacggagagacgaggaagattaaacatctgcgtgtgttctttgtgacagcagcctggagcatctttgcctatacctggctttacataattttgtctgtcagctctcccggtgtcgtggaggtctgggaaggattactcactttcttcttctttcccatctgtgttgtgttcgcttgggtcgcagcaaggcggcttctcttttacaagtacgtctacaagcggtacagggctggcaagcagagggggatgatcattgaacatgaaggagacagaccagcttccaaaactgaaatcgaaatggatgggaaagtagtcaactcccacgttgacaatttcttagatggcgctctggttttggaagtcgatgagagggaccaagatgacgaggaagccaggcgtgagatggcaaggattctgaaggaacttaagcagaagcatcccgacaaagagatcgaacaattaatagaattagccaactatcaagtcctaagtcagcagcaaaagagccgagcattttaccgaattcaagctactcgcctgatgactggagctggtaacattttgaagaggcatgcagctgaccaagcgaggaaggctgtcagcatgcatgaagtcaacatggatgtggttgaaaatgacgcagtcagtaaggtcttctttgagcaagggacataccagtgtctagagaactgtggtactgtggccctcaccattattcgaagagggggtgacttgaccaacactgtgtttgttgacttcaggacggaagatggcacagccaatgctgggtctgattatgagttcacggaagggactgtgatcttcaaacctggggagacccagaaggaaatcagagttggcatcattgatgatgatatctttgaagaagatgaaaactttcttgtgcatcttagcaacgtcagggtctcttcagaagtctcggaagatggcatactagactccaatcacgtgtctgcgattgcttgtctcgggtcacccaacactgccaccataaccatttttgatgatgaccacgcgggcatctttacttttgaggaacccgtgactcacgtgagcgagagcattggcatcatggaggtgaaggtgctgagaacctctggagcgcgaggaaatgttatcattccctataaaaccattgaaggcacagcccgaggtggaggggaggactttgaggacacctgtggagagctggaattccagaatgatgaaatagtcaaaacaatatcagtcaaggtaatcgatgacgaggagtatgagaaaaacaagaccttcttcattgagattggagaaccccgtctggtggagatgagtgagaagaaggccctgttgttaaatgagcttggtggcttcacattaacagaaggaaaaaagatgtatggccaacctgtcttcaggaaggtccatgctagagatcatccgattccctctaccgtaatcagcatttcagaggagtacgatgacaagcagccactgaccagcaaagaggaggaggagaggcgcattgcagaaatggggcgccccattctaggcgaacacaccaagctggaagtgatcattgaagagtcttacgaattcaagagcactgtggacaaactcattaagaagacgaacctggccctcgtggtggggaccaacagctggagagagcagttcattgaagcgatcaccgtcagcgctggggaagatgacgatgatgatgaatgtggggaggagaagctgccctcctgttttgattacgtgatgcactttctcacagtgttctggaaggttctgtttgccttcgtcccacctacagaatattggaatggctgggcctgcttcattgtctccatcctcatgatcggcctactgacagccttcattggagatctggcttcccactttggctgcaccattggtctgaaagattccgtgactgcagttgtgtttgtcgctcttggaacctcagtgccagacacatttgccagcaaagtagcagctacccaggaccagtatgcagatgcgtccataggcaatgtcaccggaagcaacgctgtgaatgtcttcctgggaatcggcgtggcctggtccattgctgccatctaccatgcggccaacggggaacagttcaaagtgtcccctggcacgctagctttctctgtcactctcttcaccatttttgctttcatcaatgtgggggtgctgctgtatcggcggaggccagaaataggaggtgagctgggtgggccccggactgccaagctcctcacatcttccctgtttgtgctcctgtggctcttgtacattttcttctcctccctggaggcctactgccacataaaaggcttctaaaggaacaatcaagatataataaatttatatatatatgtatacatatatatatacataaaaattatgtataatgaacagaggaaactgacatttgtcatgttcacttaacctgctgatggaatccagcttcaagaacgtactctgtactaggccggaagtcagaaaccatcatctcc

SEQ ID NO: 1201 - DNA, 3607 bp, Rattus norvegicus
gtcggctgagcggcgccggatccctggcaaaactgtggcacgaaccccgcatcgggtcggacccgcgttccccaggcgccggccagcgagcagcacgcgaggcgagcggcagagcggttgccgggcgagctggaaaccatggccaagaaggaggtaaaatcctcacttctggacaatatgatcggcgttggagatacggttctcttggagcctctcaacgaggagacgttcatcgacaacctgaagaagcgcttcgatcacaatgagatatatacatacatcgggagtgtggttatatctgttaacccctaccggtccttgcccatttattcaccagagaaagtggaagattacagaaatagaaacttctatgaactgagccctcacatctttgctttgtcggatgaagcatacagatccctccgtgatcaagataaagatcagtgcattctcattactggggagagtggagcgggaaaaacagaggccagcaagcttgtgatgtcctatgtcgctgcagtgtgtggaaaaggagcagaagttaatcaggtcaaggaacagcttctccagtccacccctgtcctggaagcttttggaaatgccaagactgtaaggaatgacaattcatccagattcggcaaatacatggatattgaatttgactttaaaggcgatccgctgggaggagtgataagtaactatcttttagagaaatctcgtgttgttaagcagccgagaggtgaaagaaacttccacgtgttctatcagctgctctcgggtgcctctgaggaactcctccacaagcttaaactggagcgggatttcagcagatacaactatctgagtctggactctgccaaagtgaatggtgtggacgacgctgccaatttcagaactgtcaggaatgccatgcagatcgtgggcttttcggatcctgaggccgagtctgtcctggaggttgtggcagctgtcttgaaactggggaacatcgagttcaagcctgaatcacgaatgaacggtttggatgaaagcaaaatcaaagacaaaaatgagttaaaagaaatttgtgagttgaccagcatcgatcaagtggttttagaaagagcgttcagtttccgaacggttgaggcgaagcaggagaaagtttcaaccacattgaatgtggctcaggcttattatgcccgtgatgccctggctaaaaacctctacagccggttgttttcatggttggtaaatcgaatcaacgaaagcattaaggcacaaaccaaagtgagaaagaaggtcatgggtgttctggacatttatggctttgagatatttgaggacaacagcttcgagcagttcattattaattattgtaatgaaaagcttcaacaaatcttcattgaactgaccctcaaagaagagcaagaggaatatattcgtgaggacatagaatggactcacattgactacttcaacaatgctatcatttgcgacctaatagaaaacaacacaaacggaatcttggccatgctggatgaagagtgcctgagacccggcactgttacagatgagaccttcctggaaaagctgaaccaagtctgtgccacccaccagcacttcgagagcaggatgagcaaatgttcccgcttcctcaatgacacgaccctgcctcacagctgcttcagaatccagcattatgctggcaaggtgctataccaggtggaagggtttgttgacaagaacaatgaccttctgtaccgagacctgtctcaagccatgtggaaggctggccatgccctcatcaagtctctgttccctgaagggaatcctgcaaaggtcaacctgaaaagacctcctactgcagggtcccagttcaaggcgtcggtggccaccctgatgaaaaacctgcagaccaagaacccgaactatatcaggtgcatcaagccgaacgataaaaaggccgctcacattttcagtgagagtctcgtgtgccatcagatccggtacctgggtcttctggagaacgttcgagtgagacgggcaggctatgccttcaggcaggcctatgaaccttgtctggaaagatacaagatgctttgcaaacaaacatggcctcactggaagggaccagcaaggtctggtgtggaagttctgtttaatgagctagagattcccgtggaagagtactccttcggtagatccaagatattcatccgaaacccaaggacattattccaattagaagacctaaggaagcagcggctggaggacctggccactctcattcagaagatttatcgaggatggaaatgtcgtacacattttctgctcatgaaaagaagccaagtcgtgattgccgcctggtacaggagatacgcgcaacaaaagcgatatcagcagataaagagttcagccctggtgattcagtcttacatccggggctggaaggctagaaaaatcctgcgggagctgaagcatcagaaacgctgcaaggaggcagccaccaccatcgcagcatactggcacggcacccaggcgcgaaaggagcggaggcggctgaaggacgaggctaggaataagcacgctattgcagttatttgggctttctggcttggatcgaaggcacgaagggaattgaaacgcttgaaggaggaggctaggcgtaagcatgcagttgctgtcatttgggcttactggcttggactgaaggtacgaagggagtacaggaaattctttagagcaaatgctggaaagaaaatctatgagtttacacttcaaagaattgtgcaaaaatacttgttggaaatgaaaaataaaatgccttccttgtcaccaatagataaaaattggccatcaagaccttacctattcttggattcgactcacaaggagctaaaaaggatcttccacttgtggaggtgtaaaaaatacagggatcaattcacagaccagcagaaacttatttatgaagagaagctggaggccagtgaactcttcaaagacaagaaggctttatatccttctagtgttggtcagccattccaaggagcttacctggaaatcaacaagaacccaaaatataagaaactcaaagatgccattgaagagaagatcattattgctgaggttgtgaacaaaatcaaccgggctaatgggaagagtacatctcggattttcctcttaacaaacaataaccttctccttgctgaccaaaagtcggggcagatcaagtccgaggtccccctggtggatgtgactaaggtctccatgagttcacagaatgatggtttctttgcagtacacctcaaggagggttcagaagcagctagtaagggtgactttctcttcagcagtgaccacctgattgaaatggcaaccaagttgtatcgcacgactcttagccaaactaaacagaagctcaatatcgagatttccgatgagttcctggtacagttcagacaggacaaagtatgtgtgaagtttattcaaggcaaccagaaaaacgggagcgtgccaacctgcaaacgaaagaacaacaggcttcttgaagtcgctgtcccttaagtgaggcctcctctctgttctcacggacttgtttcctcgtaacagtgcaattttactt

SEQ ID NO: 1202 - DNA, 1339 bp, Rattus norvegicus
cggctgtaactgtagcaaccggtgttgggtggggatgagaagagaccagagagagagagggtcagagcgacaggggatgagacaggctggtcagagtctgcactgattgttggagacgcaaaggaaagttttttctatgtctccaacctccccctcctcccccgtttctctctggagaaactaaaatctagactggacagcatccacaagagaagcacctagaagaagatttttttttcccagcagcttgctcaggaccctgcaggagctgcagccggaactggtcccgccgataaccatgaactcttcctgctgcccgtcctcctcttatccgacgctgcctaacctctcccagcaccctgcagccccctctgccagcaaccggagtggcagtgggttctgcgagcaggttttcatcaagccagaggtcttcctggcactgggcatcgtcagtctgatggaaaacatcctggtgatcctggctgtggtgaggaacggcaacctgcactcccccatgtacttcttcctgctgagcctgctgcaggccgacatgctggtgagcctgtccaactccctggagaccatcatgatcgtggttatcaacagcgactccctgaccttggaggaccaattcatccagcacatggacaacatcttcgactctatgatctgcatctccctggtggcctccatctgcaacctcctggccatcgccgtggacaggtacgtcaccatcttctatgccctccgttaccacagcatcatgacggttaggaaagccctctccttgatcgtggccatctgggtctgctgtggcatctgcggcgtgatgttcatcgtctactccgagagcaagatggtcatcgtgtgcctcatcaccatgttcttcgccatggtgctcctcatgggcaccctgtacatccacatgttcctcttcgccaggctgcacgtccagcgcatcgcggcactgccacctgctgacggggtagccccgcagcagcactcgtgcatgaagggggccgtcaccatcaccatcctgctgggggttttcatcttctgctgggcgcctttcttcctccacctggtcctcatcatcacctgccccaccaacccctactgcatctgctacacggcgcacttcaacacctacctggttctcatcatgtgcaactctgtcatcgaccccctcatctacgccttccgcagcctggagctgcggaacaccttcaaggagattctctgcggttgcaatggcatgaacgtgggctaggaacccccgaggaggtgttccacggctagccaagagagaaaagcaatgctcaggtgagacacagaaggg

SEQ ID NO: 1203 - DNA, 1277 bp, Rattus norvegicus
tgcggccgcgaagaacccatgggcctcctgaggcggcggctgctgctgctggtggtggtggtgacgacctgtgtcccagcctcccagggcctgcggtgcatacagtgcgaaagtaaccaggactgcctggtggaggagtgtgccctgggccaggacctctgcagaaccacggtgcttcgggaatgggaagacgccgaggagctggaggtggtgaccagaggcctgtgccacaaggagaagaccaacaggaccatgagctaccgcatgggctcggtgatcgtcagcctcaccgagaccgtgtgtgccacaaacctctgcaacaggcccagacccggagcccgagggcgaccttttccccggggccgttaccttgagtgtgcatcctgcacctctctggaccagagctgtgagaggggccgggagcaaagcctgcagtgccggtatcctacagaacactgtattgaagtggtgacgctccaaagcacagaacggagcgtgaaggacgaaccctacaccaaaggctgtggcagtcttcccggatgcccgggcacagcaggtttccatagcaaccagacctttcacttcctgaagtgctgcaacttcacccaatgcaatggtggcccagttctggatcttcagagcttaccaccgaatggcttccaatgttacagctgtgaggggaacgagcacctttggatgttcctacgaagagacgtcctcattgactgccggggaccaatgaatcagtgcttggaggctacaggcttagatgtgctgggaaaccggagttacaccgtaagaggctgcgccacggcttcctggtgccaaggttcccacgtggccgactccttccagacccacgtcaacctctctatctcctgctgtaatggcagtggctgtaaccgccctacagggggcgcccccgggccaggccctgctcatcttatcctcattgcctccctgctcctgaccctcagactgtggggcatccctctctggacctgaatcctgagccgtctgccctggctggacccaggaacttttgactcctccgcctctgctccatctttgaggacaggcgtgctgtattgtcttcttgggcctcaagaactggaagagaattgagaaaagggctgcgggccagcaggggggcctcttggttgagttaatattgttgctgttattattattatcattgttattaccctaatttattatgtaaatatatatataagatttttgtaccagtaaaaaaaaaagcggccgcagaattcgat

SEQ ID NO: 1204 - DNA, 4447 bp, Rattus norvegicus
gatccacctgcctctgcttcctgagtgctggtattaaaggtgtgtgccaccaccatccagcaatacacctgttttttttttttaattgttcatatagttcagtatggccttgaactcatcaagcatgagtctgctgcctctacctccttttgttattttgagatagggtctcataccatagacaaggctaatcacagactctatatgtggtccagagtggcctctaattagagattccctcctcggtctctcagaactgtgccatatacacatacatttaaacttgggggtgtgtgggtggagacagggtttcactttacagcccaggcaagtctctaactcacaacaatcctcctgacccatctcactcttgctgggattatgagccacctgccaccatgcttcccgtgttgtgttgtttttgtttcatggagaagggtctcactatgcagcccctggacagcctggaactctcggtagaagaaagaggctatcctgggatcagtccatcgtcttcctccaagatgccaccacacctggcattccagcctttttaaaaaaaaaaacttttatctttaaaaaggcgtttagacaaaaagaaagaaaaaagaaagcagatatttaaaaagttctacagacgaaatttaacagatctttgtagaattcgagggagagagcaggaccattggccaatcgctgaggatatggagctgaaacaaagtccagattttctggcaccaattccagggttctttctgggtccaggagctattcattgactcattaattcatggattcataattcatatattcattaaattgcataaagcacctgctacttgatttcgggtaactctgggaatgcagcgctggcaaaatctaagcaccacggactttacagtccatatagggcgtcacagaagagaataacaacggtctttaagagtgatgacaagggtgtcgggtgccttggaaatcgcggaattagaagtcagcgaggaaaggagaatggcgcttccgataacgtcatttgttctcggcatttcagatcctgtccagggactccaaagaaggtagcagttaaaaacaaaacaaaaaaatatctcacagaagctctattcagcgaacatcctcacccagcagcagaggagggaggtggggcacaggtatgaaacgcatgcgcaatctcactcgtgccgccccgagggtttggaccaggaccgaaaatgtgcgcaggcgctacaattcctggccagtgagaaggcgttgcccaatgaaacttcgtttggcgtctctgtcccgcccccttcgggacccccatttccgcttccggcgcgccgggtagttccaagatggcgtcggcggtgctgagtgcgtctcgagtctctgggctgctgggccgggccctcccacgggtggggcggcccatgtcgagtggcgcccacggcgaggagggttcaggtaccggggctcgggtgggcgtgggggcctcagtggctggcacgcggcctggcggggccgtgaccttggcgggaggccttgcgggagggagcggccgaggctgacattctggtccccgctgcagctcgtatttggaaggccctcacctacttcgtggcgctgcccggggtgggagtgagcatgctcaacgttttcctgaagtcgcgacacgaagagcacgagagacccgagttcgtcgcctacccccatctccgcatcaggactaaggtacgcgctgcgcctctgctgtccttcaagcgtccgttatttctgggttgtccactccccagtcccagcccttggtgcgctaggatctcggctgcctgtctatccgcgcagactgaacattttatttactctcgttttacatgagggaagccagtttgtgggtcgcggcttaattttcttaaaaagccgcacaataaatggtcctggattttcaactcccccaatttgtcatcttttgtcttctggtgcacttcagatgctgtttcctgaatgaaagcttgtagttttggggtgtccttttatagaggcagatcctgaaggtgatttacaatccgggcgttaggcttgagcacagactgccggtttgtgtagacagttttaatgtctctcgatgaattttttttttttttggttctttttttccggagctggggatcgaacccagggccttgcacttcctaggcaagcgctctaccactgagctaaatccccaacccctctcgatgaatttttaacaaggctgtttatttgctccttaaattgtatcacctaattcacataggactagccttgcagaaacttaatctagatttttacatcccacgaggctcgatcccactcgtgtacagcctcagcacttgggaggccaaagcaggcatatctcctgagctcaagaccagtctggtctacatagtgagctccagggcagttatgggtgagaaaaaggtgcttcacagcatccttgccttggcctctgcccagtaggtggcagtagtaccccggcctaactgcctctagaaaatgcgcatgtctcgcccctgacacttgggggctgaaaataagagaatcagtagctcatggtcattctctgcttcgttatgaagtaggttatcttgggccaaagaggttatcacagatagccaaaaatggttgtgagctattggccaagagcagtgcttttcaaacatggtgggaaggaactggagagatggctcagtggtttagagtggtgctgctcatacggacagaagagccagttttaatttctagtgcccaggtgggtagctcacaacttgctttagctccatatgggggtgggactggtgtcttttggcttctgtggtacactcatacttttgtgcatatgcccacaaaggaggaggaggagtactaatgatcgtaataaaaaataaagccggcatggtagcacaggcctttaatctcagcacttgggaggcagaggcaggaggatcattgtaatttttaggtcagcctgtctatgtaggatttaaggttagctaaagaaaccctgcttcaataaaaaaaaaaaaaaaaaaaaaaaaaatcagggcttcaaagatgctcagcaggtgaaggagctagcaagcccaagacggtgcatcaatgtctgggacccactgcagaaggggagaacctatatacccacacacaagtggtctctgacagtggccgtatacatgcacactcaaaacaaaaggtactgaggaaaaggatagaatcttggttgcagttttctggtcctgcattaaaaagcatccacgtctgccatcgcccttctgatacaggaagggccacaccttgatggcacaatcctggctggagcagtttccaggggaagctaggaactgcttttcttatattaaaaatgttgattatggatagatacctatgtgtgtacatatgtacctgtgagtgcaggtgtctgtggggtcagaggtgtgagatcccggcagcagttgtgagacacctgatctgatgtctgagaattttggaggagcaagtctgatgaacggagccatctttccaacatcttatgttttttaaggtttaatttcttttaaattacgtgtgtgcatgtggatgcccaagggagccaaagagggcttcaggttccctggggctggagtagtagcagttatgagctgcctggtgtggatgctgggaaccaaacttgttctattcatgggcagagcagtacatggccttagctgctgagccatctccttccctggagcttgctttactactagccacttcagaggagagatggctcggtggttagagcaccggctgctcttccaggggtcctgagttcgatttccagcaaccacatggtggctcacaaccatctgtaatgggatctgaatccctcttttgtgtgggtgaagacatagtgtttatacataaataaattaaagtacataaaaaatttaacaagaaaaactatgggacagttgaaattatgccagtaaaggacaaatttccgtttggattttgttttatctgtttcaagcagttggcaggcaagttgtttgtgagcgttttcgggaaacatctaattgccatcttcactccacagcccttcccctggggagatggtaaccataccctcttccacaatcctcacatgaacccgcttccgactggctatgaagatgagtaaagagaacctggctcttcgcccaggcgacaagggaccacagcactgatttggaccctgactcttgtgtgtggaccacgaaagcccattggatgctcagctcatctttcctttatcagatggtgaccattactttgctcctccatccctttgctcgtaagaggagatggcttaaataaataacttgaactgagattgtccgtgggctggatgctgcatttttattctcagattaattgctttgctgcttgtagatct

SEQ ID NO: 1205 - DNA, 1414 bp, Rattus norvegicus
gtggaattctgccaaactcggagagaagcctgtgcctgcagctgactcactccaggactgatgggaaccctgctgttcctaccgctccccatggacagcaacaggactgtcgtccatgtgctctcacggactttgtaccatatgctactgtggacagctgtgctaaatcttgttgctgagtctcatgcaggtcttccgaaggctgtggtgaaacttgagcccccatggatccaggtgcttaaggaagacactgtgacactgatgtgcgaagggacccacaacaccaagaactgttctactcagtggtttcacaatgggagctccatctggcatcaagcccaagccaactacacgtttaaggccacagtcaatgatagtggagaataccggtgccgaatggaggagaccggcatcagcgaacccatacatctgggagtgatttctgactggctgctactccagacctctcaactggtgtttgaagaaggggaaaccatcacattaaggtgccatagctggaagaacaaacagctgactaaggtcttgttgttccagaatggaaaacctgtgaggtattatcatcaaagcagcaatttttcaatccccaaagccaaccacagtcacagtgggaactactattgcaaagcatatctaggaaggacaatgcacgtgtccaagcctgtcaccatcactgtccaagagcccaaatccagcagttcgttgccggtattgacgattgtagctgctgtcgctggaattgctgtagctgccattgttattatcctggtatccttggtctatctcaagaaaaagcaggttccagacactccttctggtctcgaagaagctgagaaaaatgaggtggagaatacaatcacctattcacttctcaagcatcctgaagctccggatgaagaatcagatcacgactaccagaaccacatttagtctctcttgagattgggaaaagcaaaccagtaaggccaggacctagcgtctcctggtccaaggaatgctgtagatatgaaagaaaacatctagagtcccttctgtgagtcctgaaaccaacagacactacgatattggttcccaatggttgactgtactaatgacttccataacttacagcttcccaactaaagactcttttgctatagatccacacagccaataaaattaatcaacttactgttgttaagagactacagcaacgtgggaactgcttatattacatgctaaggagaacaagtaacattaggatgcataatctcagcgaggatcaactagacgtgtaccaacctgtcaaaagtgatgcttctttataagaaactttatttccttatttttctataaaggtcacatattacttttatagtaaaatgttgtgaaaatgtccaaaaaaaaaaaaaaaaaa

SEQ ID NO: 1206 - DNA, 448 bp, Rattus norvegicus
tggagatgccagacggttggttctgaggagagattttgcaacgcaatggagcgaggaagggatcgtttacacttgagaagaactactgaacagcacgtgccagagattgaggtccaggtcaaacgtagaaggacagcctcactgagcaaccaagagtgtcacttgtacccacggcgttctcagcaacagcaaattcctgtggtggatttccaggcagaactgagacaggcgttcttagctgagacaccaagaggtggttaaagcagtattggaacttcaaggtggtggaagtcaacaaacacaggacctatccactgattgtgaaactttggtcaagcttacactgtgttaatagcctgcatcaaacctttatttattgcccttctccaagtattaaggatcttgaaattttagtgttgacaactgctattgtggaacagcaatcatg

SEQ ID NO: 1207 - DNA, 3054 bp, Rattus norvegicus
cggcaacgaaggtaccatgggggagtgctgggggttggcgcagcggccgacggaggctgaatagtagcagcggtagcggaggtggcagcagcagcagcaacagcagcagcagcagtggcgtgggcagtcccagttgggctggccgcctgcgaggggacgcgcagcaggtggtggcgacccgcatcctctccccacctgggccggaggaggcccagaggaagctgaggattctgcagcgcgaattgcaaaatgtgcaggtgaaccagaaagtgggcatgttcgaggcgcaaatccaggcacagacctctgctattcaagcgccccgaagcccgcgtttgggtgagggctcgttcgccctccccgtgtcccttccgaagcagcagccagcctcctgaaagggtcttggctccatgttccccaagtgaggaacggagaacaaagtcctggggagaacaatgtacagagaccccagatgccaactccaggaggagaagcagactcagcacacacccctcgaaggacaaggagggagtggcccctcttttaggcccagccagcccgaccaggttagggactcagagtccatctacttcagtgagaatggaaagaggttccccggccagtccccgctgtggctcacccacacccatggaaattgacaagaggactgctccctcactggagcactttgggactagcttaacgttggccactaaagtggcagcttcggccgcatccgctggaccacaccctggacatgattctgttctcatggaggcagactgtgagctaggggccatgcgcccctgggaggcccacctggagagacgggggcagtttctgggcagggagaccggctcagccccagagcctatccggacccacattagagaaccccctggaagggtggaaagagttcattctgttggtggccagggctcctggacacctgaagtcatcaaaagaccagaagagggaactgtggatgcccaaagctcagagctctcagagaacccgagatggtctagactgcctggagacccgggttccgtagggcctgagaagggaggtagtaggatcccaggaatccgaggaccccagcagaccctggacagcatgagagaagggtcttcagcactgggcttgcttgggggcagccaggcagcacagccagggagcatggatgtggagacaggcattagttgtggcagaatgctggaacccttaccacctggggaagtaacaacaaatttgaaagaaccccagtgcctccctggggacaggatggggatgcagcctgagagttccatagtttggcccagtgctgtggaggaagctcccctgatctggacgtgtgacacagggatacagttaaaggggacttggagaagccaagatggagatgctcatcctagctgccaagagaagtccccagaccagaaggacaaggcctgcagccccagcaacatcccggccatccctgcagtcatcattacagatatgggtgctcaggaggatggagggttagaggagatccaaggaagccctcggggtcccctgcctctgaggaagctgtcgtcctcctcagcctcctccactggcttctcctcttcctatgaggactcggaggaggacatctccagtgaccctgagcgcactctggaccccaactcagcctttttgcataccttggaccagcagaagcccagagtgagcaagtcatggaggaagataaagaacatggtgcagtggtccccctttgtcatgtccttcaagaagaagtacccctggatccagctggcaggacatgcagggagcttcaaggcagctgcgaatggccgtatccttaagaagcattgtgagtctgaacagcgatgcctggaccggttaatggcggatgtgctgaggcccttcgtgccagcctaccatggcgacgtggtgaaggacggggaacgctacaaccagatggacgacctgctggctgacttcgattcaccctgcgtgatggactgcaagatgggcatcaggacatacctggaggaagaactcaccaaggcccggaagaagcctagcttgcggaaggacatgtaccagaagatggtggaggtggaccctgaggcccccactgaagaggagaaagcccagagagctgtgaccaagccacgttatatgcagtggcgggaaaccatcagttccacagctaccttaggcttcaggatcgagggcatcaagaaggaagatggctctgtgaaccgtgacttcaagaagaccaaaacaagggagcaggtcactgaggccttcagagaattcactaaaggaaaccagaacatcctgattgcctaccgggaccggttgaaggccattcgagaaaccctggaagtctctcccttcttcaagtgccatgaggtcattggcagctctctcctcttcatccacgacaagaaggagcaagccaaggtgtggatgattgactttgggaaaaccacgccccttccggaaggccagaccctacaacacgatgtcccctggcaggaggggaaccgggaggatggctacctctcagggctgaacaacctcatcgacatcctgacagaaatgtcccagggcagcccactcacctgaggccaccagcaccttgcatagccatgccaccttgcccgccacctctgcctgtcgcagcatctctcttcccctgattcttcttccttttcctgtctgagcgcctacctagaacagagcctcccatctgcactacaggacactttggagaagagaagagagatttttttttctaggtctttatctcccgccttcctacacaggggcctggaggtggcgtttctaattctctctaaatagaactaccttctagaagagaattgcacagagctaggcccccgcatcccgttacacttagagcctgcacgggtctagaaggctgtgggatcccaggaatccgaggaccccagcagaccctggacagcatgagagaagggtcttcagcactgggcttgcttgggggcagccaggcagcacagccaggggggatccgtc

SEQ ID NO: 1208 - DNA, 2093 bp, Rattus norvegicus
ctctggtctcatctctgccacgccactgctcagaggcacagagtgagcaacagtttggtagcgctgagtccatccactggaaattctcctcctgtctcagcggctttagctctgcagaaatgaagcatccagcctacactctccttctctctctcatcatgtctatgtgtgctgggagcaaaggccttgctgagcagctaactaaggaaaacctgaccgtgtccctcctgcctcctaacttccacaaagagaacacagtcaccaatgactggattccagaaggagaggaagatgacgactacctggacctggagaagctgctcagtgaagatgacgactacatctatgttgtcgatgcagtttccccaacagactcagaatcaagtgctggcaacatcctgcagcttttccaaggcaaaagccggatccagcgccttaacatcctcaatgcaaagtttgccttcaacctttaccgagtcctgaaggaccaggctacctcttctgataacattttcatagcacccgttggcatttccactgccatggggatgatctccttaggtttgaggggagagacccatgaggaagtacactcagttctacacttcaaagactttgtcaatgctagcagcaagtacgaggtgacaaccattcacaacctctttcgaaagctgacccatcgcctattcagaaggaattttgggtacacacttcagtcagttaatgacctttatattcagaagcagtttcccatacgggaggacttcaaagctgccatgagagagttttactttgctgaggcccaggaggctgacttctcagatcctgccttcatatcaaaggcaaacagccacattctgaagctcaccaagggcctcataaaagaagctttggagaatacagactctgctactcagatgatgattctgaactgcatctacttcaaaggagcttggatgaataaattcccagtagaaatgacgcataaccacaacttccggctgaatgagagagaagtagtaaaagtctccatgatgcaaactaaagggaacttccttgcggcaaatgaccaggagctagactgtgacattctgcagctggagtatgtagggggcatcagcatgctaattgtaattccacggaagctgtcgggaatgaagactcttgaagcacagcttacaccccaggtagtggagagatggcaaaaaagcatgacaaacagaacccgagaggtacttctgcccaagtttaagcttgagaagaattacaacctggtggaggtcctcaagtccatgggaatcacaaagctcttcaacaagaatggcaatatgtcaggcatctcagaccagaggatcatcattgatctgttcaagcaccagagtaccatcacagtgaatgaagagggtacccaagctgcagctgtaactacagtggggtttatgccgctgtctacccaagtcagattcactgttgaccgtcccttcctgttcctagtgtatgagcaccgaaccagctgtctgctgttcatgggaagagtggccaaccctgccaagtcttaatggtgctggtctgggcacctgatgtagtttggggacactctgtaatcctgttttcattctaagaggacagagatattttgatattgataatctatgtagtttgagataataatctaacagtaaacagtgtcataagtgcacagatgttaatgcaactaatggtcgtgccagctattccctagaggtcctagacacagactgcctcagcgccaacgcctctgtcactgagaatgggcagagtggagctgacactttctcctcagttagccgtaccagtcaaggtgtctcctcagccaggcccctccatatggatggtactgaggaactctcacccttccagggaggatgtccaaggagcaccattcttgcctagtggaaaagaaacctcaacatgtctgagacatttggacttaattcaaggctgaaccttttaaattcatgtaaatatcatctgttctgctttgtgtcaatagggctaccatagcctattctagagacaaataaacaaccatatttactaagcaaaaaaaaaaa

SEQ ID NO: 1209 - DNA, 2697 bp, Rattus norvegicus
cgtcccctgcggtctcctctgtgtgccatggacggcatcgtcccagacatagcagtcggtacaaagcggggatccgacgagctcttctccacgtgtgtcagcaacggccccttcatcatgagcagctcggcctcagcagccaacggaaatgatagcaagaagttcaaaggtgataacaggagcacaggagttccttccagagtcatccatgtccgaaagctacctagtgatgtcactgagggcgaggtcatctccctggggctgccctttgggaaagttaccaacctccttatgctgaaggggaagaaccaggccttcattgaaatgagcacagaggaggctgccaacactatggttaactactacacatcggtggcgccagtgcttcgtggacagcccatctacatccagttctccaaccacaaggagctcaaaaccgacagctcgcccaaccaggcacgtgcccaggcagccctgcaggctgtgaactccgtacagtcaggaaacctggccttggcagcctctgctgctgccgtggatgcaggaatggcaatggcaggccagagcccagtgctcaggatcattgtggagaaccttttctacccagtgacactggacgtgctgcaccagatcttctcgaagtttggcacagtcctgaagatcatcacgttcaccaagaacaaccagttccaggcgctgctgcagtatgctgaccctgtgagcgcccagcatgccaagctgtccctggatggccagaacatctacaatgcctgctgcacgctgcgcatcgacttctccaagctcaccagtctcaacgtcaaatacaacaacgacaagagccgagactacacacgccctgacctgccctctggagacagccagccatcactggatcagaccatggcagcagcctttggcctctctgttcctaatgtccatggagccctggcacccctggccataccctctgctgctgctgctgctgctgcagccggccgcattgccatcccagggctggcaggcgccgggaattccgtccttttggtcagcaacttgaaccctgagagagtcacaccccaaagcctctttattctcttcggcgtctacggtgatgtgcagcgggtgaagatcctgttcaacaagaaggagaacgcacttgtcgagatggcagacggcagccaggcccagctggccatgagccacctgaacgggcacaagctgcatgggaagtcagtgcgcatcaccctgtcaaagcaccagagtgtgcagctgcctcgtgagggacaggaggaccagggcctgaccaaggactatggcagctcaccgctgcaccgcttcaagaaacctggctccaagaactttcagaacatctttcctccctcagctaccctgcacctctccaacatcccgccctctgtgtcagaggatgacctcaagagcctcttctccagcaatggcggtgtggtcaaaggcttcaagttcttccagaaggaccgcaagatggcactgatccagatgggctctgtggaggaggcagtgcaggcactaattgagctgcacaaccatgacctgggcgagaaccaccacctgcgagtgtccttttccaagtccaccatctaggtgcctgtgggcctgcgaagcttccgccattccagaaaagccactttaaaaagcagctgaagtgaccttacagaccagagatttatttttttaaagagagatcagtttacctgtttttaaaaaaattaaatctagcccactttgccgtggcaggaaatggcttgggccacagaggcccaggcccagcaaccatgccttgaggggcttaggcgtgaggccacagcggtgccccaacacagccgcttctgtgccttacaaaaccagcgtgcctcacggccgcacacccaccctctaaggccaccagttgtctctagacctgcagtgagccaggcggcctatacttaggctccccaatgccgtgtaagagctggggccactcccctacacccattataatcaagtgacatgattctcccatgtccctggccagcccagagggcccaggccgtcctcagcgccgagccttgtgtgaccttgtattctattccgtggggtcacagacacctgtgcctagcaatctttccacttgaccaaatacccgagtcttttccatttatatgcaagagatagagtttttaagtaactttttatagcagtggtacaattgtatgtgtgtactctaagcttctctgtcccctgcactccttccttccagtgaccaacttgcaggtgggcccaggccagggctggagaagaagctctgaggcttgtgggtgtcctaccttcaaattttggaccaaagttttgttctctgcccgcctctgactatgcccagttgaggggctgacctctaggccttaatgtccttcctggacgcccacctccatcctagcctgtttctatgggaggggttccctgcacctcagtttctgtgaaagtcatggaagagtgtaaatatttatgattttatacctgtggggctgaggcggtgcagcattttttatggtgacagatgtatattttggtaacgactacaggctcagtattgtcctgggccagccctagccacatctaccccagcccagatggtgtattggggggagggggactttccattaaagcagtttataacctttg

SEQ ID NO: 1210 - DNA, 1358 bp, Rattus norvegicus
cgacctcaaagcaagagagcgacatggcagctcctgctaagggcgagaacctgtccctggtggtgcacggacctggagacattcgcctggagaactacccaatccctgagctgggcccaaatgatgtgttactaaagatgcattcggtggggatctgtggctcggatgttcactactgggagcatggccgaattggggacttcgttgtgaaaaagccaatggtgcttgggcatgaagctgctggaacagtcacaaaagtgggaccgatggtgaaacatctaaaaccaggagatcgggtggccatcgagcctggcgttccccgagaaatagatgaattctgcaagatcggccgatacaatctgacgccatccatcttcttctgtgccacgcccccagatgatgggaacctctgccgcttctacaagcacagcgctgacttctgctacaagcttcctgatagtgtcacctttgaagaaggggccctgattgagcctctctctgtggggatctatgcctgccgtcgaggttcggtttccctggggaacaaggtccttgtgtgtggagctgggccaattgggatagtcactttgcttgtggccaaagcaatgggagcttctcaagtagtggtgattgacctctctgcttctcggttagccaaggccaaggaagttggagcagactttaccatccaggttgccaaagagacccctcacgacattgccaagaaggtggaaagtgtgctggggagcaagccagaggtcaccatcgaatgcacgggagcggagtcctctgtccaagacggcatctatgccactcactctggcgggaccttggtggttgtgggaatgggccccgagatgatcaatttacccctagtgcacgcagctgtgcgggaggtggacatcaaaggcgtgtttcgatactgcaacacgtggccgatggcagtttccatgcttgcatcgaagactttgaatgtaaagcccttagtgacccataggttccccctggagaaggctgtagaagcctttgaaacagccaaaaagggactggggctgaaagttatgatcaagtgtgaccccaatgaccagaacccctaaatgtgattgctctatgcccttagcccactctctcagcatctaagggctaaatggaccagaaggggaagccattaatgcagaaccttctttttgaatggtaggaataataaactcataagccgagagccttagaggagctggcgtgccttaaagacagaagtaggggcaccttgggggacctcgtagccagaatgagatgcgtatactgagtaaagtctagaaccaagagtctggcagagaggtcccgaaatgccctttctc

SEQ ID NO: 1211 - DNA, 2283 bp, Rattus norvegicus
cgtcacttcccctggcctggcggcctcggccgcacttcggacaaacccactgagcgaaatcggcagggccatggccttaggggcgctgcttctgattctggggatactcgggacgcccctcgccccaggagcccgcgggtcggaagccgaaggccaactgcttaagaaacttttctcggattatgatagctcagtaaggccggcgcaggaggtgggagaccgcgtcggggtcagcatcggcctcaccctggcgcaactcatcagcctgaacgagaaggatgaagaaatgagcacaaaggtgtacttagacctggagtggaccgactacaggttaagctgggaccccgcagaacacgatggcatcgagtctctccgtgtcactgctgaatctgtttggctcccggacgtggtgctgctgaacaacaatgatggaaactttgacgttgccctggacattaatgtcgtggtgtcctttgagggctctgtgcgctggcaaccccctggcctgtatcgcagcagctgcagcatccaggtcacctacttcccctttgactggcagaattgcaccatggtgtttagttcctacagctatgacagctctgaggtcagcctgaagacaggcccagatcctgatggacaggagaggcaggaaatctacatccatgaagggaccttcatcgagaatggtcaatgggagattatccacaaaccctctaggttaatccaccttccaggggatcgaagaggagggaaggaaggacatcgtgaggaagttatcttctatctcattattcggaggaagcctctcttctacctggtcaatgtcattgccccgtgcatcctcatcaccctcctggccatctttgttttctaccttccaccagatgcaggagagaagatggggctctccatctttgccctgctgaccctcactgtgttcttgctgctgctggccgacaaagtgcctgagacctccctggcggtccccatcatcatcaagtatctcatgtttaccatgatccttgtcaccttctcagttatccttagcgttgtggtcctcaacttgcaccatcgctcaccccacacccaccaaatgcccttttgggtccgccagatcttcattcacaagctccctccatacctgggtctgaagaggcccaaacccgagagagaccaactacccgaaccacatcactccttctccccaaggagtggctggggccgaggaactgatgaatatttcatacggaagcctccatgtgattttcttttccctaaacttaacaggtttcagcctgaatcacctgctccggacctgagacgatttatcgatggtccaccccgggctgtaggtctgcctcaggagctacgcgaggtcatttcttccatcagctacatggcccgacaacttcaggaacaggaggaccacgatgcactgaaggaggactggcagtttgtcgccatggttgtggaccgtctttttctgtggacattcatcgttttcacaagcgtcgggacgctagtcattttcctagatgccacgtaccatttgccccctcctgaaccttttccttgaggaccctccggtcatttttgccaagtgctgcaggtactctcacgctgtatagcgcttggctcctgtaagaatcttgttcttgtttctgggaagacgttgaagtgggacttgggggggtgagcagggtgccttggacttcaacaaatgtccttcaacccattagttttgttcttctgcagctttgtttttgttggtttttttttgttgttgtttttttgtcgtccccccccccccccccccccggctggggagcgaacccaggatcttgcgcttcctaggtagaagcgctctaccactgagccaaatccccaaccccgtttttgttgtttttgagacagagtctcactctgtgtcccaggctagcctggaactatgaagtccaggctggcctcaaactcccagcagtgttacttccttagcttaccaaatgttggaatggcaggtctggtaagccagcgcacttggattttgtttcttgaaactacacagaatgtcacaacttagatatctagtgaaagagaattataagcaactagtagcttgaaagcctttggaggacaggaaatctgttggctactgtaaggtccccagcaatgcgcacaggtcctaccccataagtgcttaacatttgttgaagagggaaaaaaatccggaaggaaatacaaaataatactgcctacaattgcatgtattgaaattaaaatgta

SEQ ID NO: 1212 - DNA, 1832 bp, Rattus norvegicus
ctggtggggcctgatagagctggcagggttggctgggaggggcgtgtaggctgacacaggacactccaaccccccaaccccaagacctgtaaagctactgtcctactcatcactgggcagaactgaggcaccatgcacgggggccagggacctcagctcctcttgctgctgctggctacctgcctgggggcccagagccgcaaccaagaggagcggctgcttgcggacctgatgcgcaactacgacccccatctgcggccggctgagcgtgactcagatgtggttaatgtcagcctgaagcttaccttaaccaacctcatctcccttaatgagcgagaggaggccctcacgactaatgtctggatagaaatgcaatggtgcgactatcgcctacgctgggacccgaaagactacgaaggcctgtggatattgagggtgccatctaccatggtctggcagcccgatatcgtgctgggaaacaatgtggacggtgtcttcgaggtggcgctctactgcaatgtgctcgtgtcccctgatggttgtatctactggctgccgcctgccatcttccgctcctcctgctccatctctgtcacctacttccccttcgattggcagaactgctccctcgtcttccagtcccagacttacagcaccagcgagatcaacttgcagctgagccaggaggatgggcaagccattgagtggatcttcattgaccccgaggctttcacagagaatggggaatgggccatccggcatcgaccagccaaaatgctactggatcctgtgactccagcagaggaggcaggccaccagaaggtggtgttctacctgctcatccaacgcaagcccctcttctatgtcatcaacatcatcgtcccctgtgtgctcatctcctcagttgcgatcctcatctacttccttcctgccaaggcgggcggccagaagtgcacagtggccaccaacgtgctcctggcccagaccgtcttccttttcctcgtggctaagaaggtgcctgagacctcccaggcagtgccgctcatcagcaagtacctgaccttcctcatggtggtgaccatcctcatcgttgtgaactctgtggtcgtgctcaatgtgtccttgaggtccccacacacacactccatggcccggggggtccgcaaggtgtttttgaggctcctgccccagctgttacggatgcatgtgcatcctcgggctcctgctgctgtccaggatgcccggctgcgactccagaatggctcttcctcagggtggcccatcatgactcgagaggaaggggacctctgtttgcctcgaagcgaactcctctttaggcaaaggcagcgcaatggattggtgcaggcagtactggagaagttagagaatggtccagaaatgaggcagagccaggagttctgtggcagcctgaagcaagcctccccggccatccaggcctgtgtggatgcctgtaacctcatggcgcgtgcccgacaccagcaaagtcactttgacagtgggaatgaggagtggttgctggtgggccgagtgctggaccgagtctgtttcctagccatgctctccctcttcatctgcggcactgctggcatcttcctcatggcccactacaaccaggtgcctgacctgccattccctggagacccccgcccctacttgcctttgccagactgagccaaccaatcactcctgcgccctggagtcagccatgtgggtcatgctgtttatggagctgtattctctgttgatcctgatgggctcctggggagcaatcattcttgggagaagatagaggaataaaggaataggaataa

SEQ ID NO: 1213 - DNA, 1624 bp, Rattus norvegicus
gcttgtcaaagctcagaataacctgagaaccagacatcaggatgacaatggctctgcttgggaccctgcttctcctggcactctttggcagaagccaaggcaagaatgaagagctgagcctgtatcaccatctcttcgacaattatgacccagaatgccggccagttaggagacctgaggacactgtcaccatcaccctcaaggtcaccctaaccaacctcatctcactgaatgagaaagaagagactctgaccaccagtgtctggattggaattgaatggcaagactatcggctcaacttcagcaaggacgattttgcaggcgtagaaatcctgcgggtcccttccgaacatgtatggctgccagagattgttctggaaaacaatattgatgggcagtttggagtggcctacgactgcaatgttctggtctatgagggaggctctgtgagctggctgcccccagctatctaccgcagcacgtgcgcagtggaggtcacctatttcccctttgactggcagaactgctctctcatttttcgttcccagacctacaatgctgaagaggtggagttaatctttgcagtggatgacgatggcaatgccatcaacaaaattgacatcgacaccgcagcttttaccgagaatggagaatgggccattgactactgcccaggcatgattcgccattatgagggaggctccacagaagaccctggagaaactgacgtcatctacacgctcatcatccgtcgaaagccgcttttttacgtcattaacatcattgtgccttgtgtgctcatttctggcttggtgctactcgcttacttcctacctgcgcaggctggtggccagaaatgcacggtctctatcaacgtcctgctagcccagactgtcttcttgttcctaattgcccagaaaattccagagacttctctgagcgtgccgctgctgggcaggtatcttatttttgtcatggtggttgccacgctcattgtcatgaattgcgtcatcgtgctcaacgtatctttgcgaacgccaacgactcacgccacatcccctcggctgcgccagattttattagagctactgccgcgcctcctcggcttgagcccacccccagaggatcccggagctgcctcaccagcgaggcgtgcctcatctgtgggcattctgcttagagcggaggagctcatcttgaaaaagccgcggagcgaactcgtgtttgagggacagaggcatcggcatggaacttggaccgcagccgccctctgccagaacctgggtgctgcagcccctgaagtccgctgctgtgtggatgctgtgaactttgtggctgagagcacaagggaccaggaagccactggagaggaactgtctgactgggtgcgtatggggaaggccctcgacaatgtctgtttttgggcagcgttggtgctcttcagcgtcggttctacgctcatcttccttggaggttacttcaaccaagttcctgatctcccctacccaccgtgcatccaaccatgagcctgcaccaggacccacctcatccccaccccccaagaaagagattttgaaaacaggctgctgacaataaatctggtttgtgaacttgcaaaaaaaaa

SEQ ID NO: 1214 - DNA, 1460 bp, Rattus norvegicus
ttggtctttctttcagcgtcgctgtaaaagaacaaccagttgccagtgtaatcaggaaaagagttaggtcaaacttgtgggtctgccggggatccatgattagcacaaagaactctattgctgaaggattcgaagattttgcttgagcgggtgagtaaagctgccctgggaatgtctgatgtaaaaacaggtttcagacgaagcctaccaagttagcgtgcaagcatgaaaaagaagacacttatcccaggctaatgggcaaaggacctgattcacctgacaacaacgctcacctgttcccctgccttctctcacgaggcaaaaagatgagacaggaggacacctggaggagttttccatacccagcctagaacgatcagattttatatgtatgtcaaaagacgctgggtagcagaactgaataataaaagcctcttggtgtccattcacgttccttccaaagaaactaaaaaatcaaactttctggtaagctccatatatatggcatccatacagcagctcctggaaggcacttgtattcaatgaataacaagagcaagatataccgacacagcacctcagaggtgagaatgctgtgcagagggtcccccaaaactccaatgcctgcgatgcagaatctaaagttgatacataagaggagatgtgaggacacacacacacacacacacacacacacacaccactgaaacaaaatgagatattctagatgcctctgagtccaaaacttattggcacactgagtgtagctgcaaaatctgctcagaggacaaacaatgttcaaggctttgatcccggcaccttcagaagccatagccaagtgccagcctatggccactgctatgtatgcacaaagctgtgcccacatgatactctttagagtctcgactggccgtgtggcagaacagacctgtgtttctaaacggtggatgaagatgaatggctcctggcaagtggcctccactggaagccagacctagaccatttcatgactaacccaagacatggcttgagaagctcctttgtgttatttttccccatgtaaagaactgtcttctagcagtaaggcagtgaaaggcggtggataaaagcatcataattaggaagtcgaaagggagatgcttaaataatgaactttgaaaagcttctgtttatttcgttagaataaaatttctgcaatcagacttgagggctctcctttttaccttgggggtgggggacagaagttgtgtgatagaagtgactgttaatataatataaaattactcagctgggtttttaagttaatattttacattaaaatatagtttgaacttcttctgataaaaaattagcagtagatagctcgaccacagctactcaagatagaatttggcaagaaaacatccttaggaagtttacagtgtgttacagaagtgatatgtcttacttggaacgagaac

SEQ ID NO: 1215 - DNA, 896 bp, Rattus norvegicus
gaatatatttgatcggaagatcaactttgatgccctcttaaaattttcccacataactccctccacacagcagcacctaaagaaggtctatgccagttttgcactgtgcatgtttgtggcagcagcaggggcctatgtccatgtggtcacacgtttcatccaggctggcctgctctctgccctgggcgccctggccttgatgatttgcctgatggccacacctcacagccatgagacggagcagaagaggctgggactgctcgccgtcgccttccttacaggagttggcctgggacctgccctggagctgtgcattgccatcaaccccagcatcctccccacggccttcatgggcacggccatgatcttcacctgcttcagcctgagtgccctctacgccaggcgccggagttacctctttttgggaggtatcttgatgtcagccatgagcctcatgttcgtgtcctctctggggaaccttttctttggatccatttggctgttccaggcaaacctgtacatggggctgctggtcatgtgcggctttgtcctcttcgacactcagctcattattgaaaaggctgaacacggagacaaggattacatctggcactgcattgacctcttcttggacttcgttacactcttcaggaagctcatgctgatcttggccttcaatgagaaggacaaaaagaaagagaagaagtgacgtggtgatcgatcggcctctcccagctcgccttctctccctcagccccgtttctttgcacacatcacaggtgtcgtgtcccatgaaatgaaaagcatcaggaaagcttttgtactttgtggttttctctattttgaattttttgatcaaaaaactgattagtgaatatagtttggagtttggcttc

SEQ ID NO: 1216 - DNA, 4102 bp, Rattus norvegicus
gctactctgaaacttattgcacaagatattgtcaatttatcccctaactgggctcccagagaagaaaaaagtgggaagaaacgaagaagagaaggcaagagacactgctcagttagaggggaaactctacatcttctctggttgagagtctggtaaccgaaggcaagatgacgaatccatcaggacataacttgccagccaactcggtagctgagagctatgaaggggagtttggctgcaccttaatggacctgaggaagctcatggagcttcgtgcagctgatgcagtgacccagatcagtgcccactatggaagtgtacaagaaatctgcgcaagactgaaaacctcccctgtagaaggtctgtctgggaaccctgcagatttggagaagcgtagacttgtttttgggaagaacatgatacctccgaaaaagcccaagacgttcttagaattagtgtgggaagccctgcaggatgtcacactcatcatcctggagatcgcagccatcatatccctggtcctgtccttctaccggcctcctggcggggaaaatgaaatctgtggccacattgtaagtaacccagaagaagatgaggaaggagaaactggctggattgaaggggcagccattcttgcctcggtgatcattgtggtattcgtgacagccttcaacgactggagcaaagagaagcagttccgggggctgcagagtcgcattgagcttgagcaaaaattctccattatccggaatggtcagcttatacaactcccagtggctgagattgtggtgggagatattgcccaggtcaaatacggtgacctgctgcctgccgacggaatcctaatccagggaaatgatctgaagattgacgagagctctttgacaggagaatcagatcatgtcaagaagactctggacaaagaccccatgttgctctcagggactcatgtgatggaaggctctggacggatggtggtgactgctgtgggaatcaattcccagactggaatcatcttcaccctcttaggggctaatgaggaagaagacgatgagaaaaagaagaaaggtaaaaaacaaggagtctctgaaaatcgcaacaaagcaaaaacccaggatggagtggccttggaaatccagccactcaacagccaggaggggctcgatagtgaggaaaaggagaagaaagcaagcaagggacccaagaaggagaagtcggtcctgcagggcaagctcacacgcctggctgtgcagatcgggaaggcaggtctgatcatgtctatcctcacagtcctcatcctgattctatacttcgtggttgacaatttcgtgatacagcgccgggcatggcttcctgagtgcactcctgtgtacatccagtattttgtcaagttcttcatcatcggagtcactgtactggtagtggctgtgccagaggggctgccactggctgtcaccatctcgttggcctactctgtaaagaaaatgatgaaggacaacaacttggtccggcacttggacgcctgtgagacgatgggcaacgccacagccatctgctctgataagacgggcacgctgaccatgaaccgcatgaccgtggtacaagcttacattgggggcactcactaccgccagatcccaaaacctgacgacctcccacccaacgttctggacctcatagtcaacagcatctgtatcaactctgcttacacttctaagattctgcctccagagaaagagggaggcctcccccggcaagtaggcaacaagacagagtgtggactgctgggctttgtcacagacctgaagcaggactaccaagcagttcgcagtgagatgcccgaggagaagctcttcaaggtgtacaccttcaactcagtgcgcaagtccatgagcaccgtcatcaggaagccggaagggggcttccgcgtgttcagcaagggcgcctccgagataatgctgcgcaagtgtgatcggatcctgaacaaggaaggaggaattgtaccattcaaaactaaggaccgagacaatatggtacgcaacgtcattgagcccatggccagtgaaggactccggaccatcggcatagcttaccgagattttgatggtgaagagccctcgtgggaaaatgagaatgagatcttcactgggctggtctgcattgcagtggtgggcattgaggaccctgtgcgcccagaggtaccagatgccattaacaagtgcaaacgggctggcattactgtcaggatggtgacaggtgacaacgtcaacacagccagggccatcgccaccaaatgtggcatcttgactcctggtgatgacttcctgtgtctggaagggaaagaattcaacagactcatacgcaatgagaagggcgaggtcgaacaagaaaagctggacaaggtctggcccaggcttcgggtactggcacgatcttctcccacagacaagcacacattggtgaaaggtatcattgacagcaatattggggaacagaggcaggtggtggctgtcaccggtgatggaaccaatgatggaccggctctaaagaaagcagatgtcggttttgctatgggcattgcaggcacagatgtggctaaggaggcatcagacatcatcctgactgatgacaacttcaccagcattgtgaaggcagtgatgtggggccggaacgtatacgacagcatttccaagttcctgcagttccagctcactgtcaacgtggtggccgtgattgtggctttctctggagcctgcatcactcaggattccccactgaaagcggtgcagatgctgtgggtgaacctgatcatggacacgtttgcttctctggccctggccacagagcccccgaccgattccctgctgaggcgtcgcccctatgggcgaaacaagcccctgatctctcgcacaatgatgaagaacatcctgggccacgcggtgtatcagctcggaatcgtcttcctcctcgtctttgctggcgacaaactgtttgacattgacagtgggaggaaggcgcctctcaattcaccacccagccagcactacaccattgttttcaacacgtttgtgctgatgcaactcttcaacgagatcaactctcggaagatccatggcgagaagaatgtctttgcaggtgtctaccgcaacatcattttctgctctgttgttttaggcacgttcttctgccagatcttgatcgtggaagtgggaggtaagcccttcagctgcacaaacctcaccatggagcagtggatgtggtgtctctttatagggatcggagaacttttgtggggccaggtcatctctgcaatacctaccaagtctctaaagttcctgaaagaggcgggccatggcagtgacaaagaggagatcagcaaggacgctgaggggctggaagagatcgaccatgccgagatggagcttcgccgaggccagatcctctgggtccgtggcctgaaccggattcagactcagattgaagtaattaacaaattccagacgggagcctcttttaagggagtcctaaggcgacagaacttgagtcaacaacttgatgtaaaactggttcctagctcctattcagaagcagttgcgtcagtcagaacctccccctccacctcttctgccgttacacctcctcctgtgggcaatcagagtggtcaaagtatttcatagtttccgagacgtcattcataaatccaagaaccaggtctccatccacagcttcatgacccaacctgagtacgccgcagacgatgaaatgtcacagtccttcctgaatcaagaggaaagtccttcgttggcttctaagtcgcggattaccaagcgcctgtcggatgctgaaactgtttcacagaacaacacgaataacaatgccgtggactgccaccaagtgcaaatcgttgcctcccatcccaacagccctctacaaagccaggagacaccggtctgaacgtccatcctctgagtaccgtccctgctctcccctttttctcttcatctgtcctatctgtatgtgatggtgggacttgtcattgtttcatcagctgctcctaagcatgtgagaacccccacctgaccatgaagaagcacagacctac

SEQ ID NO: 1217 - DNA, 678 bp, Rattus norvegicus
atgccggtcaaaggaggtagcaagtgcatcaaatacctgctctttggatttaacttcatcttctggctcgccggcatcgcagtgcttgccattggactatggctgcggttcgactctcagaccaagagcatcttcgagcaagaaactaatcattccagcttctacacaggagtgtacattctgattggagctggggccctcatgatgctagttggtttcctgggctgctgtggagctgtacaagagtcacagtgcatgctgggattgttcttcggattcctcttggtgatattcgccattgagatcgccgcagccgtctggggctatacccacaaggacgaggtgattaaagaactccaggagttttacaaggacacctaccaaaagttaaggaacaaggatgagccccagcgggaaacactcaaagccatccatatggcgttgaactgctgtggcatagctggtggtgtggagcagtttatctcggacatctgccccaaaaagcaggttctggaatccttccaggttaagtcctgcccggatgccatcgatgaggtcttccacagcaagttccacatcattggagcagtgggcatcggtatcgccgtggtgatgatcttcggtatgattttcagcatgattctgtgctgcgccatccgcaggagccgagaaatggtc

SEQ ID NO: 1218 - DNA, 1700 bp, Rattus norvegicus
acccatctttaggattcccagaacccaccatgcctgtttcacacatctgaaattctctattagcgctcctattgtgtttggagttttaaaaaaaattctaaagatttagcgtctcgtggatccagtgctggtccagggggtcgcccaatccgccgccacccacgcgaggagtcccgacctgagggataccgctcactcagcacagaacccgccccgcgtcacttttacgtcaaggtagcgcggccaatgagagccagagttcaatgattctgactctacgcgcgcggaccaatcgacgcatcggcgggagctgcaggatttgcatggactccgaaggccactgccaatgagactgtgactggcgtgaatcatagccaataataggatgctaggggcgtggccgcgggcgtcccacgaggtaaagatgctgcgggcggaacctgccggagcaagcgggattcgggggtgctgaagtcgcaagggcagggcgggaaggaagatccggaacggggcgtgggatccggagctggaggcccccaggatttcccctctgtgaaaagacacgctgatctagataagtgaggccggccccatgtatccggaatcaaccacggggtctccagctcgactctccctgcggcagacaggctcccccgggatgatctacagtactcggtatgggagtcccaaaagacagctccagttttacaggaatctgggcaaatctggccttcgggtctcctgcctggggcttggaacatgggtgaccttcggaggccagatcacagatgagatggcagagcacctaatgaccttggcctatgacaatggcatcaacctgttcgatacggcggaggtctacgcagctggcaaggctgaagtggtattagggaacatcattaagaagaaggggtggagacggtccagccttgtcatcaccaccaagatcttctggggcggaaaggcagagaccgagagaggcctttcccggaagcacataatcgaaggactgaaagcttccctggagaggctgcagctggagtacgtggatgtggtttttgccaaccgcccagaccccaacacacccatggaagagactgtgcgggccatgacccatgtcatcaaccaagggatggccatgtactggggcacatcacgctggagctccatggagatcatggaggcctactcggtggctcggcagttcaacctgatcccgcccatctgcgagcaagcggaataccacatgttccagagggagaaggtagaggtccagctgccagagctgttccacaagataggagtaggtgccatgacctggtcccctctggcctgcggcattgtctcagggaagtatgacagtggcatcccaccctactccagagcctctctgaagggctaccagtggttgaaggacaagatcctgagtgaggagggtcgccgccagcaagccaaactgaaggaactgcaggccattgcagagcgcctaggctgcaccctcccacagctggccatagcctggtgcctgaggaacgagggcgtcagctccgtgctcctgggtgcttccaatgcagaacaacttatggagaacattggagcaatacaggtccttccaaaattgtcgtcctccatcgtccacgagatcgacagcattctgggcaataaaccctacagcaaaaaggactatagatcctaagtca

SEQ ID NO: 1219 - DNA, 1087 bp, Rattus norvegicus
ggaagagggaagaaggcgctgaggaccgcgcacgcccagcccagctgctgacttcaccacctcaccgagacccactccgctggccagcacgctacactgacaggatcctggctgcacccactgtgatctctttgaactaggatagcccgcgctcactgtttccctgaagatggaagaaatcccacccacccactacgctgcgtccagggctgcctcggtggcagagaactgtataaattatcagcaagggacccccaacaaggtattcaaggtgcagacggtccagcaggcaagcaaggaggatatcccaggaagaggccacaagtaccatctgaagttttctgtggaagaaattatccaaaaacaagttacagtgagctgcacggctgaagttctttaccctcgaatgggacaaggctctgcaccggaagtcaacttcacatttgaaggagaaatcggcaagaacccagatgaggaagacaacacgttttatcaaagactcatgtccatgaaggaaccactacaagcacaaaatattccagacaattttggaaatgtgtctccacaaatgaagccggtccaccacttagcctgggtcgcctgtggttatgtaatgtggcagaactcgactgaagacacatggtataaaatggcaaagattcaaacggtcaagcaagtgcaaagaaacgatgacttcattgagttagactacaccgtcctactccacgacgttgcatcgcaggagattatcccctggcaaatgcaagttctgtggcacccacaatacggcacaaaagtaaagcacaacagccgcctcccaaaggaagcaccagcagagtaaacaagaccccaactcggagacagccgtcaacatgccccttaaccatgagtatgactgtcctcactggcacctagctaacaggccaagtgaatcccacagtgtcgctctgtatgtcttggctacaggaccgagctgcatagattccacaataaagagtagactacatgaaagtgtctttccaatagtaatggtactatggctatccactaataaagtcaacttcagcctcacaaaaaaaaaaaaaaa

SEQ ID NO: 1220 - DNA, 2615 bp, Rattus norvegicus
tgccgggaggggcggggtggggggtggggggaaccccagttgctcagtttggatgttcctggagctccccactcgtaggggctcagcgacttcaaattttccaaactggatcgaaggcgtagagattccaggcctcggaaaaccatggctgctaataaaggaatggccataggcatcgacctgggcaccacctactcgtgcgtgggcgtgttccagcacggcaaggtggagatcatcgccaacgaccagggcaaccgcacgaccccaagctacgtggccttcaccgacaccgagcggctcatcggggacgccgccaagaaccaggtggccatgaatccccagaacactgtttttgacgccaaacgtctaattggcaggaagtttaatgatcccgtcgtgcagtcggatatgaagctgtggccatttcaagtgatcaatgaagcgggcaagcctaaggtgctggtgtcctacaaaggagagaagaaagccttctacccggaggagatctcgtccatggtgctgaccaagatgaaggagactgcagaggcttttttgggccacagtgtcaccaacgctgtgatcaccgtgccagcctatttcaatgactcccagagacaggccactaaagatgcaggggtcatcgcaggactcaacgtgctgcgaatcatcaatgagcccacagcggcggccatcgcctacggcttggataaaggaagtcacggagagcggcacgtgctcatcttcgacctggggggcggcacgttcgacgtgtccatcctgacgatcgacgacggcatcttcgaggtgaaggccacggcgggcgacacgcacctgggcggggaggacttcgacaaccggctggtgagccacttcgtggaggagttcaagaggaagcacaagaaggacatcagccagaacaagcgcgcggtgcggcgtctgcgcacggcgtgcgagagggccaagaggacgctgtcgtccagcacccaggccaacctggagatcgactctctgtacgagggcatcgacttctacacgtccatcacgcgggcgcggttcgaggagctgtgtgcagacctatttagaggcacgcttgagcccgtggagaagtctctccgggacgccaagatggacaaggctaaaatccatgacattgttctagtagggggctctacccgcatcccaaaggtgcaaaagctgcttcaagactactttaatggacgggatctcaacaagagtatcaatcccgatgaggcggtggcgtacggagctgcagtccaggcagctattttaatgggcgacaaatctgaaaaagtacaggatttgcttttgttggacgtagctcccctgtctctaggattggagacagccgggggtgtgatgactgttctgatcaagcgcaactccaccatccccaccaagcagacgcagatcttcaccacctactcggacaaccagcccggggtgctgatccaggtgtacgagggcgagagggccatgacgcgcgacaacaacctcctggggcgctttgacctgactggaataccccctgcacctaggggtgtgccccagatcgaggtgaccttcgacatcgacgccaacgggattctcaacgtcacagccatggacaagagcaccggcaaggccaacaagatcaccatcaccaacgacaagggccgcttgagcaaggaggagatcgagcgcatggtgcaagaggccgagcggtacaaggccgaggacgagggccagagggagaagatcgctgccaaaaatgccttagaatcgtatgcctttaacatgaagagcgctgtaggcgatgagggtctgaaggacaagatcagcgagtctgataaaaagaaaatactggataaatgcagtgaggtcctttcctggctggaggccaaccagctggcggagaaagaagagttcgatcataaaagaaaagagctggaaaacatgtgcaaccctatcatcacaaagctgtaccagagcggctgcacagggcccacctgcgcgccagggtatacacccggcagggctgccacaggccccaccattgaggaagtagattagcctttcccagaaaggcagggtgctagggtgcctctaggcgacatttattcacctcccaacatcactgtgattcttgaactgactggacttgagcctaagtcaccatcctttgggatctgatgcagaacccacggactccgcctttccacgcccccaccctctgatctatgatcctgaactggatctttagcacaaccaggcccctctttgagcctcgtgaagaatttggatgtctgttatttatcatccacaccccgcctttcacctccctgtgtggatggttatttgtctctcagtaaatttgttcccaaaggaaacgtctgtcacttttcgatttgtttagtcgagggccttactgtatatgtctagctgacctgacgcttaccgcattggccaatttggtccttaacttgcagcaatcctcctgtctctgccacctgaatttcgagattacggacctgcaccatcatgcccaacttgtgattttttttttttgggaggcagggtttcttgaagcctaggttagcctagaacattctatacac

SEQ ID NO: 1221 - DNA, 592 bp, Rattus norvegicus
cacgtatatttggggatgaggacttctagaagtcatctaaaattataccttgcccaaaaagtgtatatgctacaattctctgcgaagtatctaatttaaatttctttattttctttgtcacacagtaaggtgagggtgacagaggccagaggagacaacataatcctagaagacaacaagatccttcaactcttcctcatcatctctgtcttcagcccaatggtgtgcaaatgagactaacaagaaatttaccccctagtacaataacagttgatccacctccttttcttgtttgtattcctggttttatcagtggagcagtattcaatcaactaggtacaactgaatatcattatcagtgtcagctaactgctccagaccctagatctctaagcaatcctcctaatcaacttcataccacagaacaagcaaatacaaaaacagatgacaaaatctccaacactactgcgactacccaaaattccactgatactttttgaaggtggtggcaaataataaattccttttggcagttagaatagcataaatcaaaacactgtgtaattttgggagaaataatcttgaaaggctt

SEQ ID NO: 1222 - DNA, 1483 bp, Rattus norvegicus
ccagcatcctcggacaccatgtcagactctgaggaggagagccaggaccggcaactgaaaatcgtcgtgctgggggacggcacctccgggaagacttccttagctacgtgttttgctcaagagacatttgggaaacagtacaagcagactataggactggatttctttttgagaaggattaccttaccaggaaatttgaatgttactcttcaagtttgggatataggagggcagacaataggtggcaagatgttggataaatacatctatggagcacagggaatcctcttggtatatgatattacaaactaccaaagctttgagaatttggaagattggtattctgtggtgaagacagtaagcgaagagtcagaaactcagcccctggttgctttagtaggcaataaaattgacttggagcatatgcgaacagtaaaacctgataaacacttacgattttgccaggaaaatggttttagtagccactttgtttcagccaagacgggagactctgtcttcctgtgttttcagaaagttgcggcagaaatcctgggaatcaagttaaacaaagcagaaatagaacagtcacagagagtggtgaaggcagatattgtaaactacaaccaggagcccatgtcaagaactgttaatccacctcggagctccatgtgtgcagttcagtgagcacacactgtattgatagttctggctgctcttccctggattgggcccaagctgcctaggaacatgttttatcagtgactgtctctgtagtcagctcacacttcctcctgctctgctccttcatcccttagtcgcctcagagtatcgggcagctccctggacaggaaggaattcagatttggaaccacatgttttgaaatctgaatggaaagtccattctctggattgagactgcctcctcgctccagaagaaccatgttgcttctttatctcttcttttttcccagatttaaaaaatttaaacagatatgaagatgctccacgctttgatcatcattttctatttgaacttgtatatgtgaacgtgtacttgagagcactgatggtggaagttatcaagaaggtgttcctttgctggctattaagagtaaactatacaaagctgcatctgattgaaagtgcttcaaatgaggctgcaatagaaatattttttcatttttaaaaggagcctaatgtgtttatattgtagtttataactcacaagtactgagtatttgatattgtatttttattactgtatcatggtcattgcatattttatcatatttggcttagatggctttatgaattttgataaatggttcagctgatcctccacatggaatttctcctacaggctgtatgagagtgcttccagatgagtcatgatatccttggatcattgtggatcgatcacactgtacctgatgttctgatgtttttctcacataaataaatttatttaaattaaaaaaaaaaa

SEQ ID NO: 1223 - DNA, 1856 bp, Rattus norvegicus
gtctccctgagaaggctgccatggatccagccctagtcctggtgctcactctctcctctctgcttctcctctcactctggagacagagctttgggagagggaagctccctcctggtccaacacctctcccaatcattggaaacacccttcagatatatatgaaggacatcggccaatcaataaaaaagttttcaaaagtctacggccctatatttactctgtatttgggcatgaagccctttgtggtgttgcatgggtatgaagctgtgaaggaagctcttgttgatctaggagaggaattttctggaagaggcagttttccagtatctgaaagagttaacaagggccttggagtcatttttagcagtgggatgcaatggaaggagatccggcgtttctccatcatgaccctgaggacttttgggatgggcaagaggaccattgaggaccgtattcaagaggaggctcagtgccttgtggaggaactgaggaagagcaaaggtgccccttttgatcccacctttatcctgggctgtgctccctgcaatgtgatatgctccattattttccagaatcgccttgattataaagatccgacttttcttaacttgatgcacagatttaatgaaaacttcaggcttttcagctccccatggctacaggtctgcaatactttccctgccattattgattacttccctggaagtcataaccaagtacttaagaatttcttctatataaaaaactatgttttggagaaagtaaaagaacaccaagagtccttggacaaggacaatcctcgggacttcattgattgtttcttgaacaaaatggaacaggaaaagcacaatccgcagtctgagtttacccttgaaagcttggtggctactgtaactgacatgtttggagctggcacagaaacaacaagtaccactctgaggtatggactcctgctgctgctgaaacacgtggatgtcacagctaaagtccaggaagagatagaacgtgtaattggcagaaaccggagcccctgcatgaaagacaggagccagatgccctacacggatgctgtagtgcatgagatccagagatatattgaccttgtccccacaaacctgcctcatttagtgacacgtgatataaaattcagaaactacttcattcccaagggtaccaatgtgatagtatcgctgtcatccatactgcatgatgacaaagaatttcctaatccagagaagtttgaccctggtcactttctagatgagagaggtaactttaagaagagtgactactttatgccattctcagcaggaaagaggatatgtgcaggagaagccctggctcgcacggagctgtttttgttcttcaccaccattttacagaattttaacctgaagtctctggttgatgtaaaagacattgacacaacaccagctatcagtggatttggccatttgccccctttttacgaggcttgttttattcctgtgcaaagggcagactctctaagctctcatctgtaatgtctcttctgagggtcctgtctacttcattcttggtactatagtagctttaactcacatatccccatttccttcggatccagtgaacatcaaacctcattgagttgagttccctgagtcaatatatagttctattcctgttccctatatcttgtgacgttccctatatcttgtgacattcccatgcagtacttacatagttagtgctaatacttgtatgacttcattactgttaatactgttttcactatataaaagcaaaatattttagaatatgagaattcagagtcatctgttcccttcatgtgctaaataaatactaatttttggacc

SEQ ID NO: 1224 - DNA, 853 bp, Rattus norvegicus
tcatctcggcagattgactttggcccctgagtcttcaccatgccgaactggggtggaggtgcaaaatgtggagcctgcgacaagacggtttaccatgcagaagaaatccagtgcaatgggaggagcttccataagacctgtttccactgcatggcctgcaggaaggctctggacagcaccacagtggcagctcatgagtcagagatctactgtaaggtctgctatgggcgcaagtatggccccaaggggatcgggtttggacaaggcgctggctgcctcagcacagacaccggcgagcaccttggcctgcagttccaacaatccccaaagccagcacgtgcagccaccacgagcaacccttccaagttctctgcgaagtttggagaatcagagaagtgcccacgatgcggaaagtcggtatatgctgctgagaaggtcatgggaggtggcaagccctggcataagacctgctttccgtgcgccatctgtgggaagagcctggagtccacaaatgtcactgacaaggatggggagctttattgcaaagtttgctatgccaaaaattttggccccacaggcattgggtttggagggcttacacaccaagtggaaaagaaggagtgaaacggcgtgctttctcacagccctgctagtcaacagcagggcttagtgaccccatagatgtaactttggccccgcagcctcctttgtagctggactgcatttctcttcagaagcagtcataggctgcactgaccgtaaaaagagaccaccggaaatgaatctgcaaaagatgcttcattatttactatttttggggtgggagagacaataaacgttttaatggtaaaaa

SEQ ID NO: 1225 - DNA, 2960 bp, Rattus norvegicus
gaggccaaacagaaggacgtggtcactctgaacggttcaacccaagggacaacatgcagtgggcctccatcctgctgctgcgcgggctctgctcgctttcccagggccagtatgaagaagactctcactggtggctccaatacctccgaaaccagcagtccacctactacgacccctacgacacttacccctacgagacctccgacccttacccctatgaagtagaggagggcccagcctatgcctatggtgccccacctccaccagagccccgtgattgtccccaagaatgcgactgtccccccaacttccccacagccatgtactgtgacaaccgcaacctcaagtacctgccctttgtgccctcccgcatgaagtacgtctacttccagaacaaccagatcgctgccatccaggaaggtgtctttgacaatgccaccggcctcctctggattgctctgcatggcaaccagattaccagtgacaagataggcaggaaggtcttctccaagctgaggcacttggagaggctgtacctggaccacaacaacctgacccggatgcccggaccactgcctcggtccctgagagagctccacctggaccacaaccagatctctcgggtccccaacaacgctctggagggcctggagaacctcacagcattatatctccatcacaatgagatccaagaagtgggaagttccatgaggggcctccggtccctgatcctactagacctgagttataaccaccttcgaagggttcccgacggtctgccctcagccctggagcagctgtacctagaacacaacaacgtctacaccgtccctgacagctacttccggggctcacccaagctgctgtatgtccggctgtctcacaacagtctcactaacaatggccttgctaccaacaccttcaattccagcagccttctggagctagacttgtcctacaaccagctgcagaagatccctcccgtcaacaccaacctggagaatctttacctccaaggcaacaggatcaatgagttctccatcagcagtttctgcacggtggtggacgtcatgaacttctccaagctgcaggtgctacgcctggatgggaacgagatcaagcgcagcgctatgccggtggacgccccactctgcctgcgccttgccagcctcatcgagatctgaggggcttcgccttgggctcggggctccgccttggactccgggctccgccttgggatcggagatcggggctcagggctccgggctccgggctccgggcactggactccgggctccaggcatcgggtaccgggcaccggggtcccggcatatgccctgccacctgctacactcagcttgaaggtctggtttggcttttgctggatggtctgggacaagcacgtgacagaagtccacaggatcttattcagtctccttccgataggcaaagttaggtgggatcaggggccaggccagtttctgcaggggatgaaagtggtggtaaaagaaatggccgcagagtctagcccccaaatcttactatccctcaacccttccccatgacctagtctggcagaccatccccttgcttggataatagcatataaccagacaatctgacttcagctgtgctcactcaatggcttggccagttgcttctgcagtcgctctgggctcctactccttgctcctcaaaacatcaaaacgtacttcctgcccagccacttcctctaggcccagctcatcccctctgccctctttcattgaggcctcttctaaggtcttagacaatcaggagacacccacaccccaaggttggtggggagctgtccaacaacctgtggaggaagaccacacattattatctgaggttaaaaggatatctaaaaccatcacacacacacacacacacacacacacacacacacacacacacaacgtcacctgtttaaagtcagcgtattgaacagtataatggtgactgatagtcatgacttaattacaaggggataaccagccctataatggaggatccatcagaggagagaagggtcaaatgctcatttttaggatccacaataagatggggaagagtcacacctcagaatggcaggactgaaggggcagccccccttccagcttcacctgaccaacatgatctgtgccccttcttgggcttttagtatcaaaggggccagtgtggtttccaaaccatgagaaagagcctctgcccatccttggatccaggtatggaggtttgttacacagaggcagaggcagactgtgccagccgtggacccacccactaacccagacaagggtgtgatctccataactggtttgtccctaaagctagagtttaaggtaccagctcttctggagatggtcactggggtacaggaagccctagccaggcccaaggcttacctacactagacatagtttcctctgcttccacactgtgggaccacaccttatactgatggtgcctgtgacgtgtagcttgtctgagagcaaccctgtcttctcctttttaaaggtgatgttgcctaggtacagccatcgggttctctagactcactgggaaagagccacgggtagccagtggcaagaaccagttgtgagatgttagcctgaggtaggtcccttcccagatgccttagacccatgactctgtgtgcacttaggagcaagcttccctgaaaaggacagggtggggtggggtgcttagactgtgccatgggttccagatcctgaaatccacaaaagccaaaccagcttgtttgaaccagggagtgccacatgtggagcaaggctgccctgcccagagctcttgagaagcacctgcatgcagataccatctggcctctataaagggtcctcagcaagaagcaagcatgagtggtggccaacctgaccaataaagttattttataagtgcaaaaaaaaaaaaaaaaa

SEQ ID NO: 1226 - DNA, 1904 bp, Rattus norvegicus
gagcgactgcgggcccaggttgtcgcgctgcgctcggtgagtacaggatccagcttccaggatgtggtggtccttgatccctctctcttgtctgctggcactgaccagtgcccatgacaagccttcctcacacccactgtcggacgacatgattaactatatcaacaaacagaatacaacatggcaggctggacgcaacttctacaatgttgacataagctatctgaagaagctgtgtggaactgtcctgggtggacccaacctgccggaaagggttgggttcagcgaggacataaatctacctgaatcctttgatgcacgggaacagtggtccaattgcccgaccatcgcacagatcagagaccaggggtcctgtggctcttgttgggcatttggggcagtggaagccatgtctgaccgaatctgcattcacaccaatggccgagtcaatgtggaggtgtctgctgaggacctgcttacctgctgtggtatccagtgtggggatggctgtaatggtggctatccctctggagcatggaacttctggactagaaaaggcctggtttctggtggagtatacaattctcatataggctgcttaccctacaccatccctccctgtgaacaccatgtcaatggctcccgtcccccatgcactggagagggagatactcccaagtgcaacaagatgtgtgaggctggctactccacatcctacaaggaagataagcactatgggtacacttcctacagtgtgtctgacagcgagaaggagatcatggcggaaatctacaaaaatggcccagtggagggtgcttttactgtgttttctgacttcttgacttacaaatcaggcgtatacaagcatgaagccggtgatgtgatgggaggccatgccatccgcattctgggctggggaatagagaatggagtaccctactggctggtagcaaactcctggaacgttgactggggtgataatggtttctttaaaatcctcagaggagagaaccactgtggaattgaatcagaaatcgtggctggaatcccacgcactcagcagtactggggaagattctaatctgctgggacttgattgtatagtccttaggagactttttccaaaatttagcaatgcaggcagggagtgaggcagataggagtctttgattctttgagttcacctaacatgcatgaagctttcagcaaggtttgggtgactggaccagagctgccccccatcagagccaccctacctggctcccttctagcctatcccatgacagtgatcacagcctacatcctagcctctccctagactagtgctgtgtgtagcgcctgctgctgtggctctgtctgccatccctcccacccccacctcagcatccccagaccaagggctttggctgcaggatttccaaaggaatgaacaccaactacatgatgagaggacagatgccacccgccagctgcaccttgaagctagtcacttctaggactgtggcaggctttgatggcccaatgcagttctctggagaaaactacctttccccaaggcatctgcacccattgacaatggtaatgtgcccatctctccttggtcctgccctcaaccgatgcttttccagtcagggttttgttttttgttttgttttgtgtacctcaactgagttatgaagatttgtactggttttacagatcatctcatcgtatggaaaagaacaagcttcgtggtcagtttactgggtgaccggcagacaccacaatcaaactagtctggggaaaacctgcttttttgttgtaggtgccacgtaaccctgtcagtttgacaaggaatgaccgtgccaataaaccaattctccctctgcttggaaaaaaaaaaaaaaaaaaaaaaaaaaaaaaaa

SEQ ID NO: 1227 - DNA, 1294 bp, Rattus norvegicus
ggaattcccggaaaccgttgggcccgagcgaaccgtaccgagcgcgggcatcgcagagcgcgagtgcggagctcggagcgcagcacgatgggaggggagcaggaggaggagcgcttcgacggcatgctgctggccatggcgcagcagcacgagggcggcgtgcaggagcttgtgaacaccttcttcagcttccttcgacgcaaaacagactttttcattggaggagaagaggggatggcagagaagctcatcacacagacttttaaccaccacaaccagctggcacagaaggccaggagagagaagcgagctcggcaggagacagagcgtcgggagaaggcagagcgggcagccaggctggccaaggaggccaaggcagagactcccgggccacagatcaaggaactgactgatgaggaggcagagagactgcagctggagattgaccagaaaaaggatgcagagaaccatgaggtgcagcttaagaacggcagtcttgactctccagggaagcaggatgctgaggaagaggaagacgaggaagacgagaaggacaaaggaaagctgaaacccaacctaggcaatggggctgacctgcccaactaccgctggacccagaccctgtcagagctggatctggcagtgcccttccgagtcagcttccggctgaagggaaaggatgtggtggtggacatccagcggcggcacctccgggtgggcctcaaaggacaggcaccagtgattgatggagagctctacaatgaagtaaaggtggaggagagctcgtggctcatcgaggatggcaaggtggtgacagtgcatctggagaagatcaataagatggagtggtggaaccgcttggttaccagtgaccccgaaatcaataccaagaagattaaccctgagaactccaagctctcagacctggacagtgagactcgcagcatggtggaaaaaatgatgtatgaccagaggcagaagtccatgggcttgcccacctctgatgagcagaagaaacaggaaatcctgaagaagttcatggatcagcacccagagatggatttctccaaggccaaattcaactagctcctgttcaccttcctgaactcttgcagttgagcccgtagccactcaacttcctttcctgagacccaggagccttagggctgggcaggcgtgggacttcccaggcatgtgagctccagggattcactggagaagggctgggtcttgggggtcttgtccttgctatttgtcctgttacacattaaaactatttactctgttccaaagg

SEQ ID NO: 1228 - DNA, 2395 bp, Rattus norvegicus
agatcgatctaagatggcgactgtggaaccggaaaccacccctaccactaatcccccacctgcggaagaggaaaaaacagagtctaatcaggaggttgctaatccagagcactatattaaacaccctctacagaacaggtgggcactctggttttttaaaaatgataaaagcaaaacttggcaagcaaaccttcggttgatctctaagtttgatactgttgaagacttttgggctctatacaaccatatccagttgtctagtaatttaatgcctggctgtgactactcactttttaaggatggtattgagcctatgtgggaagatgagaaaaacaaacggggaggacgatggctaattacattgaacaagcagcagagacgaagtgacctcgatcgcttttggctagagacactgctgtgccttattggagaatcttttgatgactacagtgatgacgtgtgtggagctgttgtcaatgttagagctaaaggtgataagatagcaatatggacgactgaatgtgaaaacagagatgcagtcacacacatagggagggtatacaaggaaaggttaggacttcctccgaagatagtgattggttatcagtcccacgcagacacagctacaaagagcggctccaccactaaaaataggtttgttgtttaagaagacaccttctgagtatcctcacaggagactgcgtcacgcaatcgagattgggagctgaaccaaagcctcatcaaagcagagtggactgcactgaagctgactccatccaagtgttgctaagatataagagaagtctcattcgcctttgtcttgtacttctgtgttcattctcctcccccaccccaatttttgctagtgtgtccaccatcccaatcaaagaattacagtatacgtcaccccagaacccacagatgtgttcctggcccgctctgtaacagccgggtagagttaccacgacacacacttgcctttccacagtattcgaaaaagaacgtgcatttctgtcaccttagcaggaaaagatctggttttgttccactccatgcaggagcggatttgctggtgtgagagtctaagtacagctttctagcaaccttctgttttctgtcacagcattgtccttgctgtcctcttgctgatggctgctagatgttaatttatttgcttccctccttgataacattagtgattctgatttcagtttttcatttgttttgcttttgtttttttcctcatgtaacattggtgaaggatccaggactatgacagaaaggtggaataaacattacatttgtgcattctttggtaatttttttgttttttgtaactacaaagctttgctacaaatttatgcatttcattcaaatcagtgatctatgtctgtgtgatccctaaacataattgtggactataaaaatgtaacaccataattacattcctaactagaattagttgtctgcttttgtatctttatgctgtactttaacactttgtattacttaggttattttgctttggttacaatggctcaagtagaaaagcggtcccatccatattaagacagtgtacaaaactgtaaataaaatgtgtacagtgaattgtcttttagacaactagatttgtccttttatttctccatctctagaaggaatctgtactccatattgcaaggcagtctcttgtgtcttcttagtgtcttccccatgcacagcctaagtttggagcactagtttattattatgtttattacaatttttaataaattgaataggtagtatcacatgtaattaaactgatgtggctatcttttttgataaagttaagacacagtttttcagtcttaggttaataatgtacttagaatatgttaaaattcatgagaattgggattttggtgtatcaccatttgataggaacagtggctataaactgagtgttgagtttaagatgtttttacttaatggccagaaaattagaataaggaaggttaggggaatgtgcattaggaacattagtgttactatctgaataaaacataataaacaagtattaagaactatttatattggtcagttgttgcagtatggttctctgtaaacttgaaaccttgatctattccttgtatcatttaaagcaaacatgaagacattttgtctgcactacataactgtgtattgtttggatctagtgaaatgaggtgtggctgtcacagaccaaagggtaagctgaactgtgggtggcagagtggagaccgctggtgagagaagaatgctctgtaagtggttattattatgagttcatccttttcacactggtaacttgataaagatccttataaaataaatatggaattaatagcaaaaaaaaaaaaaaaaaaaaaaaaaa

SEQ ID NO: 1229 - DNA, 1427 bp, Rattus norvegicus
ctttaagagtcttggccctggcagtggcacagctccgctcgccactcctgcccgccagtctcttcatctgtcccactaccccaggattcatcagagcagccactccacctctgtgccaagatgacatcagttgccaaggtctattacagccagacgacgcagacagagagccggcccctagtggctccaggaatacgtcggaggagggtcctgacaaaagatggccggagcaacgtgagaatggagcatattgctgacaagcgtttcctctacctcaaggatctatggacgaccttcattgacatgcagtggcgctacaagcttctgctcttctcgccaacctttacaggcacttggttcctctttggcgtggtgtggtatctggtcgctgtggcccacggggacctgttggagctgggacctcctgccaaccacacgccctgtgttggtgcaggtgcacacacttaccttggggccttcctcttctccctcgaatcccagaccaccattggctatggcttccgctacatcagcgaggaatgccctctggccattgagcttctcattgcacagctcgtgctcaccaccattctggaaatcttcatcaccggaaccttccttgcaaagattgcccggccaaagaagagggctgagacgatccgtttcagccagcatgcggttgtggcttacctcaacgggaagctttgcctcatgatccgggtggccaacatgcgtaagagtctcctcattgggtgccaggtgacaggcaaactgcttcaaacccaccagacgaaggagggtgaggatattcggctcaaccaggtcaatgtgactttccaagtagacacagcctctgatagcccctttctcattctacccctgactttctaccatgtggtagatgagaccagccccttgcaagatctccccctccgcagcggggagggtgacttcgagctcgtgctgatcctaagtgggacggtggagtccaccagcgccacctgtcaagttcgcacttcctatctaccggaggagatcctctggggctacgagttcacacctgctatctcactgtcagccagtggcaaatacgtggctgacttcagcctttttgaccaggttgtgaaagtggcgtcccccggtggtctccgagatagcaccgtacgttatggagacccagaaaagctcaagttggaggagtcattaagagagcaagctgaaaaggaaggcagtgcccttagtgtgcgcattagtaacgtctgacatcctgttctctcctcctcagccctctggccttttcctctcccagtgtcctgggaaaaggatactatctgggttcgctggagagccctggaagtacccatcctctactttaccttaaaccggaggcctatgagcagtctaggcctgctggagtcctactcttt

SEQ ID NO: 1230 - DNA, 912 bp, Rattus norvegicus
atgtggcggctccgctgcaaggccaagggtggcacccacgttttgcagggtctttccaaccggacccgcttacgggaactgcagggccaaatcgccgctatcaccggcatcgctcctggcagtcagcgaatcctcgtcggctacccaccagagtgcctggatctcagcgaccgggacatcactctcggggacctgcccatccagtcaggtgacatgctgattgttgaagaagaccaaaccagaccaaaagcttcacctgcgttttcaaaacatggtgctcctagttatgtcagggaaactctgcctgtgcttaccagaaccgcagtcccagcagacaactcttgcctctttaccagtgtgtactatgtagttgaaggaggagtcttgaatccagcttgtgcccctgagatgagacgcctcatagcacaaattgtagccagtgatccagacttgtatagtgaggcaatactgggaaagacaaacgaagagtactgtgattggatcagaagggatgatacttgggggggagcaattgagatatcaatcctgtccaagttttatcaatgtgaaatatgtgtagtagatacacagacagtcagaattgatcgttttggggaagatgcaggctataccaaaagggttctactcatctacgatggcattcactacgatccgcttcagcgaaacttccctgatccggatacccctcctctgaccattttctcctcaaatgatgatattgttctcgtacaagcactggaattagctgatgaagctagaagaaagagacagttcactgatgtaaaccgcttcaccctgagatgcatgctgtgtcagaagggcctaaccggacaagctgaagcaagggaccatgccagggagacaggccataccaactttggagaggtgtga

SEQ ID NO: 1231 - DNA, 3368 bp, Rattus norvegicus
cgaccgacctgcagttgagccgagttggaaatgtgaacgcaagaagcaggcttgatttttttttcctccccccctctcctagctctctcctcctctctctccctctcgcacccacactcacgcacacctccagcccgcacacagacgtgcacgcaccccccgccgcccggcagttatgtattctccgctctgtctcacccaggatgagtttcatcctttcattgaagcacttctgccccatgtccgcgccttcgcctacacatggttcaacctgcaggcccgaaagcggaaatacttcaaaaagcatgagaagcgcatgtcgaaagaagaggagagggctgtgaaggatgaactgctaagtgagaagcctgaggtcaagcaaaagtgggcttcccgacttctggccaagttacggaaagatatccgacccgagtaccgagaggattttgttcttacagttacagggaaaaaacctccatgctgtgttctttccaacccagaccagaaaggcaagatgcggagaattgactgcctccgccaggcagataaagtatggaggttggacctcgtcatggtgatcttgttcaaaggtattccgctggaaagtactgatggtgaacgccttgtgaagtccccacagtgctcgaatccagggctctgtgtccagccccatcacataggggtttctgtaaaggaactcgatttatatttggcatactttgtacatgcagcagattcaagtcaatctgaaagtcccagccaaccaagtgatgctgacattaaggaccagccagaaaatggacatttgggcttccaggacagcttcgtcacatcaggtgttttcagtgtgactgagctagtaagagtgtcacaaacaccaatagctgcaggaaccggccccaatttttctctctctgatttggaaagttcctcatactacagcatgagtccaggagcaatgaggaggtctctacccagcacatcctctaccagctctaccaagcgcctcaagtctgtggaggacgaaatggacagtcctggtgaagaaccattttacacaggccaagggcgctccccagggagtggcagccagtccagcggatggcatgaagtagagccaggcatgccatctccaaccactctgaagaagtctgagaagtctggtttcagcagcccctccccttcgcagacctcctccctcggaacagcattcacacagcatcaccgacctgtcataacaggaccgagagcaagcccacatgcgacgccatcgactctccactttccaacgtcacctatcatccagcagcctgggccttatttctcacacccagccatccgttaccaccctcaggagacgctgaaggagtttgtccaacttgtctgccccgatgctggtcagcaagctggacaggtggggttcctcaatcccaatggaagcagtcaaggcaaggtgcacaacccattcctccccaccccaatgttgccgccgccaccgccaccaccgatggccaggcctgtgcctctgcccatgccagacaccaagcctccaaccacatcaacagaaggcggtgcagcctcccccacctcaccgacctactcgacacccagcacctcccccgcaaaccgattcgtcagtgttggaccacgggatccaagctttgtaaatatccctcaacagacacagtcctggtacctgggataaaagttgcagcgtcccaccatcctccagacagaccacctgaccccttctcaactctgtaacatggacgcaacctcaacccggcgcagttacaacttcactgtcagtggaaggggagagacaccaactcgaatcaacttgtacatggaaacagcgaacgtcgtggtcaaacagcaaaggcccataacttttcgggattcttttttttttttaatactttagggactgtcgaattctctaaatatggtgctggaaatgcgttgggctgtgtgacatttgaagtgttccagtggtggtgtgagcagtaggtgaagcggctggtaggggatgagccttgctcacgaacttcctgttgtaacacttttgagcctggccttttcacagtatttcaagaatttgcccgcgcaggtgtgtgaccctcccggagcacttggagacacctggagaatgaaatctttcgtagtagctaagatctgtgatctgtaacttacaggacactcaagggcaatgtttttggggttttcttttttttctgtaacatattagaaaaagcaatgcagttaagttatctttcttttagtttggtttggttcagcagtcagcagttaaatacataacacaaccctcaaggacagtgaacccactcatgttgcagagcaatccaaaaagacagcaaagactactactactactctcagttcggttgtttgtttttttttttttttttttgtttttttattaagttttgaaatgctgcacttacatttaaaaaaaacattttcaacaatttcaacaatgacacaaaagttcacatggaaatggggaagatggtctgttttgacagaaactgacaggaatcaaaacaatcgaattttgaattgagtgaagtgcaatttcattggatagctaagtatctttgtaagatagagattgttgaaaattctatttttgtttttcaagtcctcccaccccaggactctaaattattggggttaaaaaaaaacagccttgcaagaaaaaggggagctatttttgctttttatgttttttattgttaaacttgtatccctttaaaaaaaaaaaccgaaggaaaatttaaaaaaaaagcaaaaaaaaaaaatacaaatctaatggtgcttttacctccaatatgttaactacattaaatgctaattaattattttctgttatcaaagcacataactcaaatgaaatcatggtatctgttaattttataagctagaaatcactataatgaattatgccaattctggaaaattttacacatgtatggcaacaccagatctatcggttttcaaacgcctcgtcgtaaccagacattgtccagaagtttcaaagacccttcgcaaaccctgaatcggctacgggaaatatatcagatcgataaggacataactgtgtgagccattcagatcaaagtacttgttaggaaaataaacaaacaaacaaaaacaaaatgttcacacacacacacaccccaaatgtcttgtatcttatgtttaaggaaaaagaaaagacaaaacggcacgagggtctgaccaccatgacaacctacagcaacaaggaccaaagctgagagaggcgtctcattcactcgtgaccttctggtggcaccgagcaggctgctctcttgcacagatggttg

SEQ ID NO: 1232 - DNA, 2278 bp, Rattus norvegicus
tgtggaaggaatggaggactgggagaaggaaagccagcttcagagagccagggaggagatcttcctcgtgaccctgaaagacatcatggactattacgaggacagtacaggtcagagagcccagtgagtgtgtgtgtgtgtgtgtgtgtgtgtgtgtgtgtgtgtgtgttatctgatgcagtccatgagtatgcgtggaaaggattccacaggataaaacaagacacatcagatatttacattaaaaaacatagtggtagcaaatttacaattatgaagtgacaacaatataattttgttgttggggagacaacaacatgagggactgtattaaagggttgcactcttaggaaggttgagagccactacaaggaagtggtatcacagttccttcctacacaggcaccagtgacatttcatctccataccctgacccccttgagagggaatcagattcaacacgacccaagtggagagcagaattctcaagtggagagaagaattctcagtatcctcctctggactctgagcgtgcacacatgggtacatataactgcatacacaaccatgtgcttatagtacacacacacacacacacacacacacacatacacacacacacacatgcatgcatgcacactcaccacaattacttaattaattaacagtaacttgcccttactgagcacttaactctgtgccaggctcaggtgtgagcacatttaatggtcaaaataacatcttcaaagattattactcttctcatttcagggattaattttaagtattttacttaactgtatttcatagttcattcaacaaaacaggtgagtgaacaagagagagatctggaatttaaatctggacagcttaagaacttttagagccaacagcactcgggacagagtaaatatctggtggtgttgtaatcagactgacctgttgtaggtcggttactttgtgtaagcgtcatttttcttgggcaagggggtgaaggcttcagagactttgagtaaacaccaaacaggtttagaggatggtggcttatcagtaattgcagcatccagaaaacttgaggcaggagattgctgggttatatgatgagaaccaggccagtgtgggctataaagtgtggccctgtctcaaaactaaacaaaggaataagctactaaccactgaaaagaggggaatgactcaattatgtatagagcaatgatttggatgcaatatagacctgacaagtaagaattccgataatctgaaagaaaccacaaataattcctatttaacttgaaaatggaatccggtgtgattgtgtttaattctgaagaattcaccatccactaaaacacctaagttcattagatataatgatgtaaaaatgcttcaaatctgagagcttacctagcattcaagaagttctggattccccagtgaacgtgattgttggggggaggatggtaatggggggggaggatggggaagggaagcccatttagaaggggagggggaggggctagggggatgttggcggaaaccgggaaggggaataacaatcgaaatgtaaataagaaatactcaagttaataaagattaaaaaaagaagaagaagaagaagttctgggttcagttcccagcactgtataaaactgggtataatgtcacacacccagataatcctatctagcactagggagatgaagacatgagggtcagaagttcaaagtcacccttggtacctagagtatctgaggctattacatgagaccctgttagacaaaaatagaattggaatctatctacaacttatcccgggaacttctccgactatacagaatgtgttccctctcagaacggcctgaaatgctcagccaagtagtttcctcctcggtgttgtgcctggctagcaacctgtttgccaagataaagaattgagtgtttagatgtcccaagcatacaggaactgaaagtcactcggctggagttggcatccatctaactgactccctgtggggctggggaggctacagggtctcacacctttcagggaatgtttggttgtgagatcacaaataacagaagcagtggagcagtctggaggtatgcctacgatggagaagatttcatcgaattcaacaaggaaatcccagcctggatccccttagacccagcagccgcaaacaccaagctgaagtgggaggcagaaaaggtctatgtgcagcgagccaaggcatacctagaggaggagtgtcctacaatgctgaagaagtacctgacc

SEQ ID NO: 1233 - DNA, 2395 bp, Rattus norvegicus
gggcctataaaacagaacagtgtctcaaaaaaaattgtcaatgctttccctgagggtcgcctgcctcatcctgagcttggccagcacagtctggactgcagacaccggcaccacaagtgaattcatagaagcaggaggagatattcgtggcccaagaattgtggagagacagcctagtcaatgcaaggagacagattggcccttctgctctgatgaagactggaaccacaaatgcccttcaggctgcaggatgaaagggttgattgatgaagccaatcaggactttacaaacagaatcaacaagctcaaaaactcactatttgattttcaaaagaacaacaaggattctaattcactgaccaggaatatcatggagtatttgagaggggacttcgctaacgccaacaactttgataacactttcgggcaagtgtcagaggacctgaggcgcagaattgagatcctaaagcgcaaagtcatagagaaagcgcaacagattcaggttctgcagaaagacgtccgggatcagctgatagacatgaagcgcctggaggtggacattgatatcaagatccgctcttgcaaaggatcctgcagcaggtctgtaagccgtgagataaatctaaaggactacgaaggtcagcaaaagcaacttgaacaggtcattgctaaagagttgcttccggcaaaagacaggcagtacttgccagcaataaaaatgtctccagttcccgacttggttcccggaagttttaagagccagcttcaggaggggcccccagagtggaaggcattaacagaaatgaggcagatgagaatggagctggagaggcccgggaaggatggggcttcgcgaggagatttaccaggagattcgcgaggagactctgcaacacgtggaccagggtcgaagatagaaaaccccatgacccctggacatggtgggtctgggtattggcgtcctgggagctccggatctggaagtgatggaaattggggctctgggacaacggggtctgatgacactggaacctggggtgcaggaagctccagacctagctcaggctctgggaaccttaagcctagcaaccctgactggggtgagttttcagagtttggagggagtagcagcccagcgacaagaaaagagtatcacacaggaaaactggtcacttctaaaggagataaagagctcctcattggaaacgagaaagttacctctactggcacaagcaccacacgtcgttcatgctctaaaaccattactaagactgttttgggtaatgatggtcaccgggaagtggtcaaagaagtggtcacttcggatgatggttctgactgcggtgatggcatggacttaggcctgacccacagttttagtggcagacttgacgaactttcccgaatgcatcctgaacttggttccttttatgacagccgctttggttcactcacaagtaacttcaaagaatttggcagtaagacctctgattctgacatcttcacagacatcgagaaccctagctcccatgtacctgagttttcttccagtagtaaaacctcaactgtcaggaaacaagtaaccaagagctataaaatggcagatgaggcagcaagtgaagctcaccaagaaggagacactcgaaccaccaagaggggccgagctcgcacaatgagagactgcgatgatgtccttcaaacacatccttcaggtgcccaaaatggcattttcagtatcaagctacctggatccagtaagatattttctgtttattgcgatcaagagaccagtttgggaggatggcttttgatccagcaaagaatggatggatcactgaattttaaccggacctggcaagactacaagagaggtttcggcagcctgaatgacaagggggaaggagagttctggctaggcaatgactacctccacttactcactctgagaggctctgtcctcagggttgaattagaggactgggctggaaaagaggcttatgcggagtaccacttccgggtaggctctgaggcagagggctatgcactgcaggtctcctcctaccagggtaccgctggagatgctctgatggagggctctgtggaggaggggacagaatacacttcacacagcaacatgcagttcagtacctttgacagagatgcagaccaatgggaagagaactgtgccgaggtctacgggggaggctggtggtacaatagctgtcaagccgccaatctcaatggcatttactaccctgggggcacctatgaccccaggaacaacagtccctatgagatagagaacggagtggtctgggttcccttcagaggagcggattattctctgagggccgttcggatgaaaatcagaccgctggtgggacagtagaataaa

SEQ ID NO: 1234 - DNA, 948 bp, Rattus norvegicus
atgagcaccgagccctggaaccactccatcactggctttgtgctgacgagcctttttgacaacagccagacacacctgttcctgtttagcatggtggtgttggtctacatccttgctatggtgggcaacacagccatggtccttttgatttggatggacccccgactccacacccccatgtacttcctcctcagccagttgtcctttctggacatcttctttacctcagtcactgtccccaagatgatggtaggctttctctttggttggacaagcatctctttcggaggctgtggggcacagatgtttttcttcatgttcctgggggctgcagagtgcctcctgctggccctcatggcttacgatcgttatgtggctatctgcaaccctctgcgctacccagtgctcatgagcggccgggtgtgcctgctcatggtcgtggcctcctggttgggaggatccctcaacgcctccattcagacttctctgacccttcagttcccctactgtggatcacggaagatctcccacttcttctgtgaggtgccctcgctgctgatgctggcctgtgcagacactgaagcctatgagcaggtactatttgtgacaggcgtggtggtcctcctggtgcccattacattcattactgcctcttatgccctcatcctggctgctgtgctccgaatgcactctgcggaggggcgtcagaaggccctagccacatgctcctctcacctgacagtcgtcaatctcttctatgggccccttgtctacacctacatgttacctgcttcctatcactcaccaggccaagacgacgtagtatccgtcttttacaccgttctcacacccatgcttaaccctgtcatctacagcctcaggaacaaggaagttacaggggcaatgaagaaagcagtggggaggtgtagagtcagtaggaatgcctga

SEQ ID NO: 1235 - DNA, 930 bp, Rattus norvegicus
atggaaaggatgagcaatgtcacagaattcatcctcctgggcttgacccaagacccagacctgcagaaactcttattcattgtgtgcttaataatctacttgatcacactggcaggtaacatgctcatctcagtcaccatcttcatcagtccatccctggctactcccatgtacttctttttgtcctacttgtccatcatagatggtttctactcttcttccatagcacccaaaatgatctatgacttaatctctgagaagagcaccatatccttcaatggctgcatgactcaactttttgctgagcatttttttgctgctgatgaaatcatcttgttgattgctatggcctatgatcgttatgtagccatctgcaagcccttgcactacatgaccatcatgagccgacctgtgtgtatattcctagtgggtgctgctgtaatcttaggattcatccatggagcaatacaaactttatttatggcccagttacccttctgtggtcccaatatcatcaaccattttatgtgtgatttaataccactcctggagttggcctgcactgacacacacactctggggcccctgatcgctgccaacagtgggtcactgtgtttgcttactttctctatgctggttgtttcctatgtggtcatccttcgctccctgaggaatcacagttcagaagggcgtcgcaaagctctgtctacctgtgcctctcatgtcactgttgttgtcttattctttgtaccttgttcttacctgtacctaaggcccatgacctccttccccactgacaaagctgtaactgtgttttgcaccctagtgacacctatgctgaaccctttaatctataccctcagaaatgaggaagtcaaaagggttatgaagaagctctggggtcaaatgaggaaagttcatgataagtaa

SEQ ID NO: 1236 - DNA, 954 bp, Rattus norvegicus
atggagggatacaacacatcatctactgactttactttcatggggctgttcaacagagaggaaacctcaggtcttgtatttgccacaatctctgtcatcttcctcactgcactagtggccaatggaattatgatctttctgatccatacagacactcaactccatacccctatgtacttcctcctcagtcacttgtctttcattgacatgatgtacatctcaaccattgtgcctaagatgctatttgactatcttctagggcagaggaccatttcctttgtgggatgcacagctcaacactttctctacctcacccttgtaggagctgagttctttcttctgggcctcatggcctatgatcgctatgtggccatctgcaatccactcaggtaccctgtcctcatgagccgccgaatctgttggattatcatagcaggctcctggtttgggggatctttggatggcttccttctcaccccaatcaccatgagttttccattctgtagttcaagagagattaatcacttcttctgtgaggcacctgctgtgctgaagttggcatgcgcagacacagccctctatgagacagtgatgtacgtgtgctgtgttctgatgttgttgattcctttctctgtagttatctcctcctatgcccggattctggccactgtctaccacatgagctctgtggaaggtaggaagaaagcatttgctacctgctcctctcacatgacagtggtaaccttgttttatggggctgccatatacacctatatggtaccacacgcttaccattccccatcccaagacaaaattttttctgtgttctacactatcctcacacccatgctgaaccccctcatctacagcatgaggaacaaggatgtgtctggagccctgaggagggcactggggaagatcaggagttctcaacgagcggccaaacacttctga

SEQ ID NO: 1237 - DNA, 1289 bp, Rattus norvegicus
cgcggccgcttctcactggcccagagcaagtgaagaccagtggagaatgaacccgttttcctctgagtcagcatggctctgcttgactgccactgcggtgctggggggcatgcttctctgcaaagcctggagttcagggcagctaaggagccaggtggtgtgtctggctggcctctggggaggtgcctgcctgctcagcctgtccctcctctgcagcttgttcctcttatcggtgtcctgcttcttccttctgtatgtgagttcatctgaccaagacttgttacctgtggatcaaaaggctgtgctggtgacaggtgccgattccggtttcggtcatgctttggccaagcacctggacaagctgggtttcacagtgtttgctggagtgctggataaagagggcccaggagcggaggaattgaggaaaaactgctctgagcgcctttcggtgctccagatggatgtcaccaagccagagcagataaaagatgttcacagcgaagtcgcagagaagatacaagacaaaggactgtgggctgtggtcaacaatgctggggtcttgcactttccgatcgacggggaactcattcccatgaccgtgtacagaaaatgcatggcagtgaacttcttcggagccgtcgaggtcaccaaggtgtttctgcctctacttagaaagtccaaggggaggctggttaacgtcagcagcatgggagccatgattccatttcagatggtggccgcctacgcctccacgaaggcagctataagcatgttctcagccgtcatcaggcaagagcttgccaaatggggagtcaaagtcgtgaccatccatcctggaggcttccaaacaaacatcgtaggctcacaggacagttgggataaaatggagaaggagatcctggaccacttttccaaagagattcaggagaactatggacaggaatatgtccatacgcagaagctcgccctcccggtcatgagagagatgtccaacccggatatcacccctgtgctgcgggacatccagcacgccatttgtgccaagaacccctcttccttttattgctcagggagaatgacttacctgtggatctgcttcgcggcctactccccgatcagcttattggactatattttgaaaaactattttactccaaaactcatgccaagagctttaaggacagcaagttagaagaacaagggcccgggtagggtgggaaatgccacatgcttaggatgaaagggaaacctcttattaaactaactttctacctcaaaaaaaaaaaaaa

SEQ ID NO: 1238 - DNA, 2436 bp, Rattus norvegicus
ccagttgggtccgcggcagtgggatccgccgggccgccccgtgctcgcgcccgggtctgcgcgtctgctctctccagctcatgccctttggagccgcgcgccccgggactgcggcagcgcacacagagtgctcggttggctgcagggcagcgggaggaggcggccgccagagtgagctggaggcatgggccaggcggcctggaaggggtttgtgctgtctctgttcgactataagactgcaaagttcgtggtcgccaagagcaagaaggtggggctgctctaccgggtgctgcagctcatcatcctgttgtacttgctcatatgggtgtttctgataaagaagagttatcaggacattgacacttccctgcagagtgctgtggtcaccaaagtcaagggggtggcctatactaacaccacgatgcttggggaacggctctgggatgtagcagactttgtcattccatctcagggggagaacgttttcttcgtggtcaccaacctgatcgtgactcctaaccagcggcagggcatctgcgctgagcgtgaaggcatccctgatggcgagtgttctgaggacgatgactgtcacgctggggagtctgttgtagctgggcacggactgaaaactggccgctgtctccgggtggggaactctacccggggaacctgtgagatctttgcttggtgcccagtggagacaaagtccatgccaacggatccccttctaaaggatgccgaaagcttcaccatttccataaagaacttcattcgcttccccaagttcaacttctccaaagccaatgtactagaaacagacaacaaacatttcctgaaaacctgtcacttcagctccacaaatctctactgtcccatcttccgactggggtctattgtccgctgggcaggggcagacttccaggacatagccctgaagggtggtgtgataggaatctatattgaatgggactgtgaccttgataaagctgcctctaaatgcaacccacactactacttcaaccgcctggacaacaaacacacacactccatctcctctgggtacaacttcaggttcgccaggtattaccgtgaccctaatggggtagagttccgtgacctgatgaaagcctacggcatccgctttgatgtgatagttaatggcaaggcaggaaaattcagcatcatccccacagtcatcaacattggttctgggctggcgctcatgggtgctggggctttcttctgcgacctggtacttatctacctcatcaggaagagtgagttttaccgagacaagaagtttgagaaagtgaggggtcagaaggaggatgccaatgttgaggttgaggccaacgagatggagcaggagcggcctgaggacgaaccactggagagggttcgtcaggatgagcagtcccaagaactggcccagagtggcaggaagcagaatagcaactgccaggtgcttttggagcctgccaggtttggcctccgggagaatgccattgtgaacgtgaagcagtcacagatcttgcatccagtgaagacgtagccagagctctcggcagagaacagattcgatgattgggccaggacaggccacagctctgaactgacgagaggcatctcggtggggcctgctcaggatgaggcttctgagaaaagcccctcaactccacaaagttagggtgggatcctgctgcaaacttttttgtttcacggaaggtctcctggtggcctaagtggctcaggatgcaggaaggagaccctggggcaggccctcagggaaggggcaggcctggggtttcagttggtttccgttcctgactctgagcccgctggacatgcgtttatttacacaggcgtttacacatgcgtttatttacacacttactggtgcatgcagcactttagcccgacctgagaggcttgagatgctgacctggccccagggtagaaggcacacatgttaactctcaccagagacatcatagtcagccccacccgcctggcttcctccagcctctagcccagactttttgacaggtccccgccaagaatgatggttgctcagtaaaagctgttggatgacatccaggagacacttagcttcgcccccagatgtaagatgtaaagctggccaaggaggcacctggaaaacaacttagggaagagcaaactcccggggctcttaggtaagattggagaggggaggcaagtaagccactagcctgctccagccactacccaaagcctagagtagctctggaaaactgacttgcccaggtcagatggacttgtgcagttcagctcttgctgcttggtggtgctgggggtctctgtctgacttccttcctgctcccagaagctcagccttgatatgctgagataaaggatgattttcactgaaaaaaaaaaaaaaaaaaaaaaaaaaaa

SEQ ID NO: 1239 - DNA, 1988 bp, Rattus norvegicus
cggcggctctggaggccgcagtccgcgtcccggcttcggcccgtgccgcaccatggtgacgctcgcagaactgctggtgctgctggccgcgctgctggccacggcctcgggctacttcgtcagcatcgacgcgcacgccgaggagtgcttcttcgagcgggtcacctcgggcaccaagatgggcctcatcttcgaggtggcggagggcggcttcctggacatcgacgtggagatcacaggaccagataataaaggaatctataaaggagaccgggagtccagcgggaagtacacgtttgcagcccacatggatgggacatacaagttctgctttagtaataggatgtccactatgactccaaagatagtgatgttcaccattgacattggggaggctcctaaaggacaagacatggagacagaagctcatcaaaacaagctagaagaaatgattaatgagctggcagtggccatgacagccgtaaagcacgaacaggagtacatggaagtccgggagagaatacacagagccatcaacgacaacacaaacagcagagtggtcctttggtccttcttcgaagctcttgttcttgttgccatgacattgggacagatctactacctgaagagattttttgaagtccggagggttgtttaaaaggccttttcctattgatcccaaattcatgatttacttgtttaccaaacaccttggtcataataatgtcattagtttatacatttttattttctgaacgttcatgacttatgtttctttgtgattattaggtgttggggaaaacctgtttaggaaagttagagtgaaaatttgacatttggttggcctgtaattcttacttgaaagcagcccatgatacaggtcctttcaagagttcagaggctgttgatgctgtatgggactatggtctttattatgtttttacctttggttttcatagtagaatgcagtttttccaggaagtgcccacagcctgacatacttgttaactaactgcattctagtagttccttggctgtgcttcatcatcagaggctccttttgtttctccagcaacagcgatctgaatcttgacccttgtggcccctcctcagggccaggagacctgatggggcatgttaccagggcgggcactcatactttctcttgagtttgatttaaagactcatcgcacacttccccctaaagttttatattgaaccttagaactgaatcacctctaattgaattgacacaagcagccaataacttagccgtctgtcgagtccagttccccgggtgtcagacagacagactgctgtccctgtgtgctgcatatctgtctgttgttggcactcaggaagatggagttcctcacgtggaagcctgcacttctcaagctaaagggttaaacctctgggattgcttgcagtgatggcagccactgttgtccttttagtcagtggccttcgtgccctggtcttcagtgtcagcaatagggtttatttgtcctctggggtctttcttttttggcacatgtcagttttgtttataaaagatgaagagactgtctctctgatgatgggcttaatgaaaggcactctgctttgggtgtgggcggtccaggattatgtggtgactaatgtctgttagttacctggatattttatttttatttttggatcttgcaaggggaaaactacaagtaacaagttttataaatttaatttaaatttgttacaggtttccatgttcaggacaaataatttttcaaccttcgatgatatcttgcaacagttggttggtgactctgtcaccctagggcagctgttgcatgccaatttttttgtgtgtgtatgtgtgaaaacacttcagaattgaattaaaagatgtaaatttaaaatcggttgtgtatctaatatgccccaagttcagtaaataaacaattctttttaaaaccaaaaaaaaaaaaaaaaaaaaaaaaaaaaaa

SEQ ID NO: 1240 - DNA, 1800 bp, Rattus norvegicus
gaagccctgtctctgtctgcccagggaagtaagaacagcagcactcttggatttggctgcatagaactgtgtcctccaggttatcaggagggcagggctaagtggctgaggtctacgatcctgtcaaggaccttttctgagaaaagtctctaaaagagcatcacaccagaaggaataagcaagtcatgaattctccggactgttgctaccttctaacttctgggcagatgtctgtcaagagctaggtccactggcccatacacatcctgctgaagaagcaacagaagtttccagctgaagcttctctgagacagcatgaaagccaacaataccacgacgagtgccttgtggttgcaaatcacctacgtcaccatggaggctgccattggtctctgtgctgtagtgggcaacatgctggtcatctgggtggtcaagctgaaccgcactctgaggaccaccaccttctatttcatcgtctccctagcactggcagacattgctgttggggtgctggtcatacccttggccattgccgtcagcctggaggtccagatgcacttctatgcctgccttttcatgtcctgtgtgcttctggtcttcacccatgcttccatcatgtccttgctggccattgctgtagaccgatacctgcgagtcaagctgacagtcagatatagaacggttaccactcaaagaagaatatggctattcctgggcctctgctggctagtgtcctttctggtgggactgacccccatgtttggctggaatagaaaagtgaccttagagctctctcaaaacagctccaccctctcatgccacttccgtttcgtggtcggcttggattacatggtcttcttcagcttcatcacctggatcctcatccccctggttgtcatgtgcatcatctatctggacatcttctacatcatccgaaacaaactcagtcagaatctgactggcttcagagagacgcgtgcattttacggtcgggagttcaagaccgctaagtccctgtttctggttctcttcttgtttgccttgtgctggctgcctttgtccatcatcaattttgtttcctactttaatgtgaagataccagagattgcaatgtgcctgggcatcctgttgtcccatgcgaactccatgatgaaccctattgtctacgcctgcaaaaataaaaaagttcaaagaaaccactttgtgatcctcagagcttgcaggctctgtcagacctcggattctttggactcaaaccttgaacagactactgagtagttaccatgacagataaagagccagctcatttaccttcacagttcgcatcggtaaacactataaggacttaacagccattcttgcttacttccactgcagtgggatcatcgggctggttgccacagagctcccttccctcctccctccgctcctccctccactcctccctccgctcctcccttccctcctccctctgctcctccctccagtcttccctccactcctccctcccgccttcatgtattttcttgagcttctctcattcaattctgtggaggtctgacatgaaggcaatgcattcctggttaccacagacttcgcccttccttcccagacacaagaagtaatggagtgaatgttgagggagtctcctctcactaaagaagactctagtggggctggatgtacagaacctgcgttgaaggatccctaggatgttgggaacacagggagtgaattgaatttaaagagggctaaattcacctgtgtgggtgcatttgagcaaataaaagatggcgccca

SEQ ID NO: 1241 - DNA, 2600 bp, Rattus norvegicus
cgggaccgaccgcaagctggatccggacggtgacagtaccatgggatcctcatcggaaagaagagacagtgttttatggtcagacatccccaagggcccccttagtgcctaccgagcaagagcctccttcaattccaaggagctgatgctcttctgggacggccaggatgtactcgacttcaagaaaaccatcttctcaactttggagaatgaccctctcttcgcccgcccattcggggctgatctgcctctggagaaggaacgagaactgaacttccttcgctgcaagagggtctttgagtatggcttcttcaacgcagaggacatgctaaagaaccccctgaagattctagtattgatgaactgcctgggcatgtacgactggtccctggccaacaaatgtgtcctccacatgttggtttttggatctacaattatcggttctggttctgagcaccatttcaagtaccttgagaagatatataacctggagatttttggctgtttcgctctcaccgaactgagtcatgggagtaataccaaggccatgagaacaacagctcactatgatcctgctactcaggaattcatcttacattctccagatttcgaggctgccaaattttgggtgggcaacctgggcaagaccgcaactcatgcggtggtgtttgcccagctgtacacgccagatggccagtgccgagggctgcattccttcctggtgcagattcgggacccgaagaccctgcttcccatgccaggggtgatggtcggtgacatggggaagaagttgggacagaatggcctggataatggattcgccatgttccacaaagttcgaattcctcgccagaacctgctggaccggaccgggaatgtcacctctgagggacattaccacaccccctttaaggatgtccggcagcgtttgggggcatcattgggcagcctgtcctcgggacgcatctccatcattagcatttctgtggtcaacctgaagctggctgtgatcatagctatccgattctcagccacgcggcgtcagtttggacccacagataaggaagagatccctgtcctcgagtatccactgcagcaatggcgcctacttccatacctggcagctgcctatgccttggaccacttctccaagacaatcttcttggacctgatagagctacagcgtgccggcaaagtggggaccacagtgacaggcaggcagagctcgggacgggagatccacgcactagcatcagcgggcaagcccctagcctcatggacagcccagcggggaattcaggagtgccgtgaggttgttgggggacacggctatctagccatgaaccggtttggcgaactcagaaatgacaacgatccaaactgtacctatgaaggcgacaacaatgtcctgctgcagcagaccagcaactacctgctcagcctcctggagcatcctctccaagacggagctcacttcacaagccctctcaagacagtgaacttcctggaagcctaccctggaatcttgggccagaagttcatggcctccagcaaggctgactggttggactcagaagcccccctggcagcctaccgttggcttgtttgctacctgctccgagagagtcatcagagatactgtcaagagaaaaagtccagaggcagtgactttgaagcaaggaacaacagccaggtgtatggctgccggcccctggccctggccttcatggagctcactgtgatgcagcgcttccacgagcatacacacagctctagcgtgcctccatctctgcggactgtgcttggacggctcagcatgctctacggcctgtggtgcctgagccaacacacggccctgctctaccgaggtggctacatctctggggagcaaacaggaaaagcgatggaggatgccatcctgatgctgtgtgtgcagctgaaagacgatgcggtggccttggtggacgcgattgccccttctgactttgtcctgggctccccaattggcagagctgatggcgagctctataaaaacctgtgggcagctgtcctgcagcagagcggtgtgctggagcgtgcggcctggtggcctgagttcactgccaacaaatctgtggccaacaggctgaagtcccagctgtagacacagttggaggggtgtctgagcaggagcagccgatccagaggcctggacccagacaatcagacacccacgctggaagacacactaaatcctctccttgactctcgtcagcctgcgcgtacccatccccaatggggtatttgcaaggagtttgcacagtgtgtctccccgagggccttggaatttaacaaaggattttgtaatgctatctcgggggcccagataggaatgtaaaggtctgctcaggtaaactttgggatccgtggaagattttcaagatgctctcttctctctgctgctatctgcytcttttaacctggcgtggggtaaccatacgtctgtttaccggccacttgccactctgtacccatggactgtcagaatgtaatttgaagattttttatatgaaaaaaaatgttttattaagtcttcggtggcaccagaagtttccactgag

SEQ ID NO: 1242 - DNA, 1772 bp, Rattus norvegicus
ccgttgctgtcgggtcaccacagagcccaggagaagccaggacatggaccccataagtaacgacagcagtgaaatcacctatgattactctgatggaaccccaaatcctgacatgcctgcagatggcgtttacattccgaagatggaacctggggacattgcagcccttattatctacttggccgtgttcctggtaggagttaccggaaatgccctggtggtgtgggtgacagcctttgaggccaaacgtactgtcaacgccatttggtttctgaatctggcggtggccgacctcctctcgtgcttggcactgcctatcctgtttacgtccattgtaaagcataaccactggcccttcggtgaccaggcctgtatagtcctgccctcgctcattctgctcaacatgtactccagcatcctgctgctggccactattagtgccgaccgtttcctgctggtgttcaaacccatctggtgtcagaagttccgccggcctggcctggcctggatggcttgcggagtaacctgggtcttagcattgctcctcaccattccgtccttcgtgttccggcggatacataaggacccctactcagatagcattctatgtaatattgactatagtaagggtccgttcttcatagagaaggctatagccatcctgcggctgatggtgggtttcgtgttgcctctgctcactcttaacatctgctacaccttcctcctgatccggacctggagtcgcaaggccacgcgctccaccaagacgctcaaagtggtgatggcggtggtcacatgtttctttgtcttctggctaccctaccaggtaacaggggtgatattagcttggctgccccggtcctcatccacttttcagtcagtggagaggctgaactccttgtgcgtttccctggcctacatcaactgctgtgttaaccctatcatctacgtcatggctggccagggtttccatgggagactccgaaggtcactccccagcatcatacgaaacgtgctctctgaggactccttgggcagggacagcaagagtttcactcggtccacgatggatacctccacccagaagagtcaggcagtgtagaggagatgccacaactgcctagctgctccttttccagtcctcctccccttcctccttcctcctctcacccctcctcccttcctcccatctctttgcatgtttaattttatgtgattctctttaaattgccctgactagccttgagcccaggatgctcacggatgctgagattataggtaaaaattcctttggagagaaacattacattaagatattactgggctttttttctgaggcaggccttggcctcgttgcccatctgcagtgtctaggcagatacacctagtgatgacgtctaggggtcaggtaacagagaacccaggtctcgagggaacccggggctcacggatacactacgtgagtaagctatagccctagactccaggcaacaaataagcacccaccctttatttcttttctatgtctgatttttttgtttatttgagacaaagtccatgtaggctagtctagccatggactcctcctgtgatcatcctccagaggtcgagactgtagacctgtgctaccatgcccgacctatcctttatttctgcaattttgtcttttcaaaaatggtattcgacagaacccaacatatccaagttttgtaaaaacaactgtgcacggcttacacgataaaaaatttttgtttttttaaaaaggcaaaaaa

SEQ ID NO: 1243 - DNA, 1044 bp, Rattus norvegicus
aattatgtgccactcacgcaaccatctccacaccatgactggcctgagggctccggcgccagctccctccaccagcccggaactccggcggggctccggtcccgagattttcaccttcgaccccctcccggagcgggcggtagcgtccgccgtgcgtccgaacacttctcgcgggcaccgaaaacgcagccgacgggtgctctaccctcgagtggtccggcgccagctaccaaccgaggaacccaacattgccaagaggatcctctttctcctgctcgccatcatcttctgccagattttgatggctgaagaaggtgtgtcgcaggccctggctccggaggatgctaccagcgccatatcacctgagcccatctctgtgcccattactgcgcctcctgtcctcgagcctttgaacctgacctcggagtcctcggactatgctctggatctcaaagcttttctccagcaacacccggcggcattctaaacgcgatgggtcacagtccggaaaaaaaacccaaagaggcaccaggggtacctggtgcgcaagaacgtatcccaaactgggacttataaggcaacgctaactcagaacactaccgccaagatgccggcaccgtgggtcctggctaggctcactggtgacggacggaggtcttctcggtgtctaattaatatttatgtatttatgtatatcctcctaggtgaaggaggggtgtatgtaatatttattctaacttatgcaggggtgcgagatatgcccccttgctgtgacacagatatttattacgatttatagggtccgtgagacagagttgtgggaggattagtttagtcttggtcggggggcataggtttaggggtaacactccattttccagcacttcgactctgttgtaagactttggcagacccttgggaatacggtctgtggcctttgatgtcttcctgactggaagtcttgggtccatggattgtcagagggcggctgtctggggtcgcctagtatgttctgtgaacacgaataaacttgattgcctgtca

SEQ ID NO: 1244 - DNA, 1436 bp, Rattus norvegicus
cgccggagcggcaacacttcttaagtcttcttattttccgagtccaaacttcttggcctctttctcaggaaaactgcgaccaggatgtggaatagcggattcgaaagcttcagcagctcctcctatggcgcagcgggcggctacacgcagtcccccggtggcttcgggtcacccacaccgtcgcaggcagagaagaaatcaagagcccgagcccagcacattgtgccctgtaccatatctcagctgctctctgctactctgactgatgaggtgttcaaaattggggatgtcgagatttcacaggtcactattgtgggaataatcagacatgcagagaaagcgccaaccaacattgtctacaaaatagacgacatgaccgcagcgcccatggacgttcgccagtgggttgacacagatgataccagtggcgagaacactgtggttcctccagaaacatacgtgaaagttgctggccacctcaggtcttttcagaacaaaaagagcctggtggcctttaagatcattcctctggaggatatgaatgagttcacggcgcacattctggaagtggtcaattcacacttgatgctcagcaaagccaacagccaggcctctgtagggagaccatctatgagcaacccaggaatgggtgagccaggaaacttcagtgggaataacttcatgccagcaaatggcctcaccgtggtccaaaaccaggtgctgaatttgattaaggcttgcccaagacctgaaggattgaacttccaggatctcaggagccagctccagcacatgcctgtagcctcaatcaaacaagcagtggattttctatgcaacgagggccacatttactctacagtggatgatgatcactttaaatccacggacgcagagtaacgagctctgggaactggcatcccagcgggcctgtcatcatctatctgttcttcccagctctgcaggttttggacagaagttccctgtagaaggtctcagctgaagtccttttggaacgcattgctctttgttttgtcacttattgtttagaggttcaaaaggagataggcagttgagaaagaagtaaactgagcaggatttcttaagagaaattccgataagctagtcaggactccagatggatggtgggaatggaaggaggaccagcagagcagagcagaaccacgtcatgcttgggagcctctgttcttgaaaggcttccgtcgagaacgaaccatactagggccaagggcccaagaagaacctaccttccttccccttgtcctgcctgcagttgaaagaaggtttaaatgagcctgaggttctgtgcaaaggcctcatggggcagacaggaagaaatgttactgtgtttgtaatataaatgttcatatgtttgataaaacagttcacttgtaaaaaaaaaaaaaaaaaaaaaaaaa

SEQ ID NO: 1245 - DNA, 2325 bp, Rattus norvegicus
ggaattcggcacgaggatggatctgtcaccccgcaaccggccgcttctggactcgtcctcgctggacagtggctccctgacctcgctggactccagcgtcttctgcagcgagggcgaaggggaacccttggctctgggggactgccttacggtcaacgtgggaggcagccgcttcgtgctctctcagcaagctctgtcctgcttcccgcacacgcgcctgggcaaactggccgtggtggtggcctcctaccgccgcctgggcgccctggctgcagcccccagccccttggagctttgtgatgatgccaacccggtagacaacgagtacttcttcgaccgcagctctcaggcattccgttatgtcctacactattatcgcactggccgcttgcacgtcatggagcagctctgtgcactctcctttcttcaggagatccagtactggggcatcgatgaactcagcatcgactcctgctgcagggacagatacttcagaagaaaggagctgagtgaaactcttgacttcaagaaggacacagatgaccaggaaagtcaacatgagagtgaacaggacttctcacaaggaccttgtcctaccgtccgacaaaagctctgggatattctggagaagcctgggtcttccacagcagcccggatctttggagtgatctccatcatttttgtggcagtgtccatcgtcaacatggccctgatgtcagctgagctaagctggctcaacctacagctgctggagattttggagtatgtgtgcatcagttggttcaccggggagttcattctgcgcttcctgtgtgtgaaagacaggtgccacttcctgaggaaggttccaaacatcatagacctccttgccatcttgcccttctacataactcttctggtggaaagcctgagcggcagccacaccacccaagagctggaaaatgtaggacgtctggtccaggttttgaggctccttagagctctgcgcatgctgaagctgggaaggcattctacaggattgcgctcacttgggatgacaatcacccagtgctatgaagaagtcggcctactgctcctgtttctatctgtgggaatttctatattttcaacaatagaatactttgcagagcaaagcattcctgatacaaccttcacaagtgttccttgtgcatggtggtgggccacaacatccatgactacagtaggatatggggacattagaccagacaccacgacaggcaaaatcgtggccttcatgtgtattctatcaggaatccttgtcttggccttgcctattgccattattaatgatcgcttctctgcttgttatttcaccttgaaactcaaggaagcagctgtgagacagcgtgaagctctcaagaagcttaccaagaatatagccactgactcatacattagtgttaacctgagggatatctatgcccggagcatcatggagatgcttcgattaaagggcagggagagagcgagtactagaagcagtggtggagatgatttctggttttaagtttaccttcaacttatttacaaaacctatgtacatttgactggattgatgaagccttgctgctatggctatctgtatactgattatgattttcttgaccacttatcttctttctggtgtattttctagaatatttaacatctcctatagcatctactgattattttaacacacatgtcttcaacgtagccaattaatacaaccaaaatcaattgggaaaagaacacgtatctgaattttgaagtatcaattaatataatttcatacatcaaaatttaaagaatcatgtgtcattattcttgggctttcagcagtgatgttttctgttttttcatggaagtagaactgcacagtccatggggagttggggcagtgagcatttaaaaatacacagtgcatctttttgtcatttaaagatattctacaaataagttacttctttctctatcaattaaaactattgagtataaatataagctttgcaatcaaacacttaagcttagtagccatagtgagtaccacatcttccatcaagtgcaagtcactggttccaactggacagagctctacccttcaacagtcaatttctaagtggaagcctcaaactgctgaagacttgaagtaggtgagacttcaagtccctggacaatttcattatcccagctgagtgtgatgtgtgaagaagaatgcagcatagctctctgggaaaattaaatgatttataaaacatttcattatggatgaattatttaagctatgctttcaaagtcatgaatatggaaaactaaaccgaattc

SEQ ID NO: 1246 - DNA, 2048 bp, Rattus norvegicus
ccgtgcgtcagtcagaacacgttcctgtttgcagaccacaaacccaggaaagccaggatggacactgctggaaaagttattaagtgcaaagcagctgtcctatgggggacgaaccagcccttctccattgaggacattgaagtggccccaccaaaggctaaggaagttcgtgttaagattttggccacgggaatctgtggcacagatgaccacgtgatcaagggaacgatggtgtctaagttcccagtgattgtgggacacgaagcagttgggattgtggagagtgttggagaagaggtcactacagtgagaccaggtgacaaagtgatccccctctttctaccacagtgtagagaatgcaacccctgccgcaacccggaggaaaatctctgcattaggagcgacctgacaggccgtggagtattggctgacggcacgaccaggttcacatgcaagggcaaaccagtccagcactttatgaacaccagcaccttcactgagtacacggtcctggatgaatcctccgtagctaagattgatgccgaggctcctcccgagaaagcctgcttgattggctgtggattttccactggttatggggctgctgttaaaactgccaaggtcagccctggctccacctgtgctgtgtttggcctgggaggagttggcctgtcagtcgtcatgggctgtaaagcggccggcgcctcccggatcatcggaattgacatcaacaaggacaaatttcagaaagccctggatgtaggggccacagagtgtatcaatcccagggacttcaccaagcccatcagtgaggtgctgtcagacatgacaggcaacactgtccagtatacttttgaagttatcgggcgccttgagaccatggttgatgccctctcatcttgccatatgaactatgggaccagcgtggtggtcggggctcctccgtcagccaagatgctcagctatgacccaatgctgcttttcactggacggacatggaagggctgcgtctttggtggttggaagagcagagatgatgttcccaaattggtgactgaattcctggaaaagaaatttgacctgggccagttgataacccacaccttgccttttcataacatcagtgaaggatttgaattgctttattcagggcaaagcattcggactgtcctgacattttgagatccagagagctgggtgttctgtgctgggcgaccgtgacctgaagccttgttcctgacagtgttctctgatatcacgagtctgtctcagaaatgccatgcagaggccaggttggggacaagagagagaagctctacagaggtttataaaccttcatatgtttagtttaccgggtgcctagcattagcagagaacagtaagagtaaatgttctagtctgcgttttcctaagacgataattctacacttcataagcatatacttggggttccaatttgttggaagagggactgttttccagaattttaccacaagttgttgttacttaaaaacagacaaagcatgtcgagagatgtagagaatacatttttcaagagatccccaccaaagccacccgagctctcattctgtttttcaacagaaacacttttaaaaatgttataaattaacttgaattagattgtgaaattgcacacataacttgattagattaagaaagaaagttgggaaatttaagggaagggcacgttttttaatgattaactttgaaaattatcgttatgtaatttagtgacatgggggaagcacatctgtgcctggggatatcgtcagcgtttattaatataaagcacttttacagtagcgattacagatgaaccatagatataaccacattgggatatttatgatattaaggttaataaagtagaatgacaagtccttaagggcatagtagtaactccatttaacatgaagattattctcagattgctttaactacaccagcctgtatctgcatctgtctgtggacatgtacacacacgtaatattcattaaattttcattgtggtaaaagaaaaaaaaaaa

SEQ ID NO: 1247 - DNA, 1819 bp, Rattus norvegicus
actgtgaacagtaaggattttgatttttaagatgcctgggaagtggatttctgctcttctcctgctacagataagttgctgtttccaatctgggaactgtgggaaggtgttggtgtggccgatggaattcagccactggatgaatataaaaacaatactggatgaacttgtacagaggggccatgaagtcactgttctgaaaccttcggcttactatgttcttgatccgaaaaaatcgccagatcttaagtttgaaactttccctacatctgtcagtaaagatgaactggaaaattatttcataaagcttgtggatgtgtggacttatgagttgcaaagagatacatgtttgtcttattctcctttactacaaaatatgatagatggattttctgattactatctaagtctttgtaaagacaccgtttcaaacaagcagctcatggcaaaactacaggaatccaagtttgatgttcttttgtcagatcctgtggctgcctgtggggagctgatagccgaagtgctccacattccttttctgtacagtcttcgcttctctccaggctacaaaattgaaaagtccagtggaagatttatattacctccatcttatgtaccagtaattttgtcaggaatgggtggcccaatgacattcatagacagggtaaaaaatatgatatgtacgctttattttgacttttggttccatatgtttaatgccaagaaatgggatccattttacagtgagattttgggaaggcccaccaccttagctgagacaatgggcaaagcagaaatgtggctcattagatcctactgggatttggaatttccccacccaacattaccaaatgttgactatattggaggactccaatgcagacctcctaaacccttgcccaaggatatggaagattttgtccagagctctggagagcatggcgtggtggtgttttctctggggtcaatggtcagcagcatgacagaagaaaaggccaatgcaattgcatgggcccttgcccagattccacaaaaggttctttggaaatttgatggcaaaaccccagcaaccttaggacccaataccagagtctacaagtggcttccccagaatgacctccttggtcatccaaaaaccaaagcctttgtaactcatagtggagccaatggtgtctatgaggccatctatcatggaatccctatggttggcattcctatgtttggagaacaacatgataacattgcccacatggtggccaaaggagcagctgttacactgaatatcaggacaatgtcaaagtcagatttgttcaatgcactaaaggaaataataaacaatccattctataaaaaaaatgctgtgtggttgtcaaccattcaccatgaccaacctatgaagcccctggacaaggctgtcttctggattgagtttgtcatgcgccacaaaggggccaagcacctgaggccacttggacatgaccttccctggtaccagtaccactctctggatgtgattggattcctgctcacctgttcggcagtcattgcagtccttactgtaaaatgcttcttgtttatttaccgactctttgtgaagaaggaaaagaaaatgaagaatgagtagagctcatttacaatgcactacaggaatgaaatttcagcctcattctaatttatgaatcaccttcttaacacttcctgattatttttttgtcaaggcagatcatctttgtaagaagacatataactccgtaaatactgatatgttatcaaaaattccatcattcataaattttaatagcacttaatataaaaatat

SEQ ID NO: 1248 - DNA, 2355 bp, Rattus norvegicus
acccccgggctgcgctgctctccgctgccgcctccgccgcgcccactccgctcgcctcctgcctccaaaagggcagggcttcgccgaggcttggcgggaaaaagaagcgaggggagggatccggagtcgcagtataaaagaagcttttcgggcgttttttttctgactcgctgtagtaattccagcgagagacagagggagtgagcgggcgggttggaagagcccagtgtgcagagccccactccgggcttcctaggaaggcagctctggagtgagaagggctttgcctccaggcttgctgcctcctcgacccaatcctcccgctgacccaacatcagcggtcgcaaccctcgccgcctctgggaaactttgcccattgcaacgggcagacacttctcactggaacttacaatctgcgagccaggacaggactccccaggcgcaggggagggaatttttgtctatttggggacagtgttctctgcctctgcccgcgatcggctcccctgaaaagagctcctcgcgttatttgaagcctgaatttcctttgggaggtggaaaacccgacagtcacgacgatgcccctcaacgtgagcttcgctaacaggaactatgacctcgactacgactcggtgcagccctatttcatctgcgacgaggaagagaatttctatcaccagcaacagcagagcgagctgcagccgcccgcacccagtgaggatatctggaagaaattcgagctgctgcccaccccgcccctgtcccccagccgccgctccgggctctgctctccgtcctatgttgcggtcgctacgtccttctccccaagggaggacgatgacggtggcggtggcaacttctccaccgccgatcagctggagatgatgaccgagctacttggaggagacatggtgaatcagagcttcatctgcgatcctgacgatgagaccttcatcaagaacatcatcatccaggactgtatgtggagcggcttctcggccgctgccaaactggtctccgagaagctggcctcttaccaggctgcgcgcaaagacagcaccagcctgagccccgcccgcgggcacagcgtctgctccacctccagcctgtacctgcaggacctcaccgccgcagcgtccgagtgcatcgacccctcagtggtcttcccctacccgctcaacgacagcagctcgcccaaatcctgtacctcgtccgattccacggccttctcttcttcctcggactcgctgctgtcctccgagtcctccccacgggccacccctgagcccctagtgctgcatgaagagacaccgcccaccaccagcagcgactctgaagaagaacaagatgatgaggaagaaattgatgtggtgtctgtggaaaagaggcaaccccctgccaagaggtccgagtcagggtcatccccatcaagaggccacagcaaacctccacacagcccactggtcctcaagaggtgccatgtctctactcaccagcacaattatgcagcacccccctccacaaggaaggactatccagctgccaagagggccaagttggacagtggcagggtcctgaaacagatcagcaacaaccgcaaatgctccagccccaggtcctcagacaccgaggaaaacgacaagaggcggacacacaacgtcttggaacgtcagaggagaaacgagctgaagcgtagcttttttgccctgcgcgaccagatccctgagttggaaaacaacgaaaaggcccccaaggtagttatcctcaaaaaagccaccgcctacatcctgtccgttcaagcagatgagcacaaactcatctcagaaaaggacttactgaggaaacggcgagaacagttgaaacacaaactcgaacagcttcgaaactctggtgcataaactgaccggaagtgaggaggagctggaatctcgagtgtaaggagaacggttccttctgacagaacttggacttcaaaaaatgcatgctcaaagcctaacctcacaaccttggctggggctttgggacttcagccataatgttaactgcctcaaagttaaggcataaaagaacttttttttatgcttcccatcttctttctttttcctttaacagatttgtatttaattgttttttttaaaaaaatcttccggtgtacatagggcctttaaatgtaaataactttaataaaacgtttataacagttatacaagattttaagacatgtatgataaaccataattttttttatttaaagaccttttcatttttaaagttgatttttttctattgtttttagaaaaaataaaataattggaaaaaatataattgagccaactcttaaaaaaaaaaaaaaaa

SEQ ID NO: 1249 - DNA, 6822 bp, Rattus norvegicus
cagtgttttgtcgtttgcgcaatggcgtgtgtctgccagtagatggcagtgacacgttgagtgccgccaaccttttcttttttctttctttttttttttttttccccttccagggccgttttctgatatatgttgggtaccatagagtgaatctcagaacaggaagcggaggcataagcagagaggattccggaaaggtctctttgttttcatgtccacagagaaagcaagggggaaaaattgaatgtaatttgcaaatccctgtggcccaaatctgaagaactacagggggtggcaccgtccattctaaccatcttggatgctgtcctttgttgagctgtgattcctaaggctctccatcaggcaattcttatgcaagaagctaaacgtaattaaatgtgcaggatgaaaagatggcccaggcactgctggtacccccgggacctgagagcttccgccttttcactcgagaatctcttgctgctatcgaaaagcgtgctgcagaagagaaagccaagaaacccaagaaagagcaagacattgacgatgagaacaaaccaaagccaaacagcgacttggaagctgggaagaaccttccatttatctatggagacattcctccagagatggtgtcagagcccctggaggacctggacccctactatgtcagtaagaaaacttttgtagtgttgaataaagggaaggcgatttttcgattcagcgccacctccgccctgtatattttaactccgctaaaccctgttaggaaaattgccattaagattttggtacactctttgttcagcatgcttatcatgtgcactattttgaccaactgtgtatttatgacgttgagtaatcctcccgactggacaaagaatgtagagtatacgttcactgggatctatacctttgagtcacttataaagatcttggcaagagggttttgcttagaagatttcactttcctccgtgacccatggaactggctggatttcagtgtcatcgtgatggcatatgtgacagagtttgtggacctgggcaatgtctcagcgctgagaacgttcagagttctccgagcattgaaaacaatatcagtcattccaggtttaaagaccatcgtgggggccctgatccagtccgtgaagaagctgtccgacgtcatgatcctcaccgtgttctgtctcagtgtctttgctctaatcgggctgcagctcttcatgggcaacctgaggaataaatgctcgcagtggcccccgagcgattcggcttttgaaaccaacactacttcctacttcaatggcacaatggattcaaatgggacatttgttaatgtaacaatgagcactttcaactggaaggattatatcgcagatgacagtcacttttatgtcttggatggacaaaaagatcctttactctgtggaaatggctccgatgcaggacaatgtccagaagggtacatctgtgtgaaggctggacgaaaccccaactacggctacacaagctttgacaccttcagctgggccttcttgtccctgtttcgactcatgactcaggactactgggagaatctttaccagttgacattgcgtgcagctgggaaaacctacatgatatttttcgtcctggtaattttcttgggctcgttttatttggtgaacttgatcctggctgtggtggccatggcctatgaggagcagaaccaggccacactggaggaggctgaacagaaggaggcagagtttcagcagatgctggagcaactgaagaagcagcaggaggaggctcaggcagtggctgcagcctccgcggcatccagagacttcagtggaataggagggttaggagaacttctggagagttcttcagaagcttccaagttgagctccaagagtgctaaggagtggaggaaccggaggaagaagaggagacagagggaacacttggagggaaaccacagagccgatggagacaggtttcccaagtcggaatcggaagacagtgtcaaacgaagaagcttcctgctctccctggatggcaacccgctgactggtgacaagaagctgtgctctccccaccagtctctcttgagtatccgtggctccctgttttccccaagacgcaatagcaaaacgagcattttcagcttcagaggtcgggcgaaggacgtggggtctgagaatgactttgcagacgatgagcacagcaccttcgaggacagcgagagcaggagagactccctgtttgtgccgcacagacctggagagcgacgcaacagtaacggtaccaccactgaaacggaagtcaggaagagaaggctaagttcttaccagatttcaatggaaatgctggaggattcctctggaagacaaagatccatgagcatagccagtatcctgaccaacaccatggaggaacttgaagaatctagacagaagtgcccaccatgctggtatagattcgccaatgtgtttttgatctgggactgctgtgatgcatggttaaaagtgaagcatcttgtgaatttaattgtgatggatccatttgttgatcttgccataacaatttgcatcgtattaaatacactgttcatggccatggagcactatcccatgacccagcagttcagcagtgtgctgactgtgggaaacctggtcttcactgggatcttcacagccgaaatggtccttaaaatcattgccatggacccctattattatttccaagagggctggaatattttcgatggaattattgttagcctgagtttaatggagctaggcctggcaaatgtggaggggctgtctgtgcttcggtccttcagactgctccgagtcttcaagttggcaaagtcctggcccacactgaacatgctcattaagatcatcggcaactcggtgggcgcactgggcaacctgaccctggtgctggccatcatcgtcttcatttttgccgtggtcggcatgcagctgtttggaaagagctacaaggagtgtgtctgcaagatcaatgtggactgcaagctgccgcgctggcacatgaacgacttcttccactccttcctgatcgtgttccgagtgctgtgtggggagtggatagagaccatgtgggactgcatggaggtcgcgggccagaccatgtgccttattgtgttcatgttggtcatggtgattgggaaccttgtggttctgaacctctttctggccttattgttgagttcctttagttcagataaccttgctgctactgacgatgataacgaaatgaacaacctccagatcgcggtgggaaggatgcaaaagggaattgattttgtgaaaaataagatacgggagtgcttccgaaaagcgtttttcagaaagccgaaagtgatagaaatccaagaaggcaacaaaatagacagctgcatgtccaataacacgggcatcgaaataagcaaagagcttaactaccttaaagacggtaatggaaccaccagcggcgtgggaaccggaagcagtgtggaaaaatacgtaatcgatgaaaatgactacatgtcattcataaacaatcccagcctcaccgtgactgtgccaattgctgtgggagagtctgactttgaaaatttaaatacggaagagttcagcagtgagtcagaattggaagaaagtaaggagaaattaaatgcaaccagctcttctgaaggaagcacagttgatgttgctccaccccgagaaggtgaacaagcagaaattgaacctgaggaggaccttaagccagaagcttgttttactgaagggtgcattaaaaaattccccttctgtcaagtaagtacagaagaaggtaaaggaaaaatatggtggaatcttaggaagacatgctacagcattgtggagcacaactggtttgagacattcattgtgttcatgattctcctcagtagtggcgctttggcctttgaggatatatacattgagcaacgaaagacgatcaagaccatgctggagtatgcagacaaggtcttcacgtacatcttcatcctggagatgctcctcaaatgggtggcctatggatttcaaacctatttcaccaatgcctggtgctggttggacttcctgatcgttgatgtttctttggttagcctggtagccaatgctcttggttactcagaacttggtgccatcaaatccctacggacactgagagctctgaggccgctccgagccttatcccgctttgaaggcatgagggtggttgtaaatgctcttgttggtgcaattccctccatcatgaatgtgttattggtgtgtctcatcttctggctgatttttagcatcatgggtgtgaatctgtttgctggaaagttctatcactgtgttaacacgacaacaggcaacatgtttgaaataaaagaagtgaacaatttcagtgactgtcaggctcttggcaagcaagcccggtggaagaatgtgaaagtcaactttgacaacgttggggctggctacctggcattgctgcaagtggccacattcaaaggctggatggacatcatgtatgcagctgttgattcgcgggacgtcaaactgcagcccatatatgaagaaaacctgtacatgtacctgtactttgtcatcttcatcatcttcggctcgttcttcactctaaatctattcatcggtgtcatcatagacaacttcaaccagcagaagaagaagtttggaggtcaagacatctttatgacagaagaacagaagaaatactacaatgcaatgaagaagctcggctcaaagaaacctcagaagcccatccctcggcctgcaaacaaatttcaagggatggtctttgattttgtaaccagacaagtgtttgacatcagcatcatgatcctcatctgcctcaacatggtgaccatgatggtggaaacggatgaccagagcaaatacatgaccctggttttgtcccgaatcaacctagtgttcattgtcctcttcactggggagtttctgctgaagctcatctccctcagatactactacttcacgatagggtggaacatctttgactttgtggtggtgattctctcgattgtaggaatgtttctcgcagagctgatagagaagtatttcgtgtcccctaccctgttccgagtcatccgcctggccaggattggacgaatcctacgcctgatcaaaggcgccaaggggatccgcactctgctctttgctttgatgatgtcccttcctgcgctgttcaacatcggcctcctgcttttcctggtcatgttcatctacgccatctttgggatgtccaactttgcctatgttaaaaaagaggctggaattgatgacatgttcaactttgagacttttggcaacagcatgatctgcttgttccaaatcaccacctctgccggctgggacggactgctggcccccatcctcaacagcgcacctcccgactgtgaccccgatgcaattcaccctggaagctcggtgaagggggactgtgggaacccatccgtggggattttcttttttgtcagctacatcatcatatccttcctggtggtggtgaacatgtacatcgctgtcatcctggagaacttcagcgtcgccaccgaagaaagtgcagagcccctgagtgaggacgactttgagatgttctacgaggtctgggagaagttcgaccctgacgccactcagttcatagagttctgcaagctttctgactttgcagctgccctggatcctcccctcctcatcgcaaagccaaacaaagtccagctcattgccatggacctgcccatggtgagtggagaccgcatccactgcctggacatcttgtttgcttttacaaagcgggtcctgggcgagagtggagagatggacgctcttcgaatccagatggaagatcgcttcatggcttccaacccctccaaggtctcttatgagcccattaccaccaccctgaaacggaaacaagaggaggtgtctgctgctatcattcagcgtaattatagatgttatcttttaaagcaacggttaaaaaacatatcgagtaaatacgacaaagagacaatcaagggaaggattgacttgcctataaaaggagatatggttattgacaaattgaatgggaattccaccccagaaaagacggatgggagttcctccacaacctctcctccttcctatgacagtgtaacaaaaccagataaggaaaagtttgagaaagacaaaccagaaaaagaaatcaaagggaaagaggtcagagagaatcaaaagtaaaaagagacaaagaaatgtctttgtaatcaattgtttacagcctctgaaggtaaagtatccgtgtcaactggactctaaggagaggtccatgccaaactgactgtttcaacaaatactcaaggtcagtgcctataccagacagtgacctctgtcactgccactctgtgagacagggtatcaacattgacaagaggttgctgcttccattaccagctgacactgctgaggagaactccattgtgcaagtgacccgtcatcatgcccccaaactccattagtacaacgctcctgtcatctatttttaacattcacatttgccatatttttacaaaatctgtcccagtgtatcttcctggtccccacttcatagtctgttcataatactatgtcactatttttgtaaatgaagtttacgttaagggaaaatatatatataagaatcccatgttgctaagtccacaagtttctccagtaatcataaaaaaatattttgcctgagagatgaaattattgctcaaaacaaaaaaaaataaattctaatgttaacagtttc

SEQ ID NO: 1250 - DNA, 715 bp, Rattus norvegicus
gttgagaagtttgtcgacagattagggagatgagtctggtggggggctttccccaccaccccgtggtgcaccatgagggctacccgttcgccgcagccgcagccgccgctgctgctgccgccgccagccgctgcagtcacgaggagaacccctatttccacggctggcttattggccacccggagatgtcgccccccgactacagcatggccctgtcctacagtcccgagtacgccagcggtgccgcgggcctggaccactcccattatgggggagtgccgcccggtgccgggcctcccggcctgggggggccgcgcccggtgaagcgtcggggcaccgccaaccgcaaggagcggcgcaggactcagagcatcaacagcgccttcgccgagctgcgcgagtgcatccccaacgtgcccgccgacaccaaactctccaaaatcaagactctgcgcctggccaccagctacatcgcctacctcatggatctgctggccaaggacgaccagaacggagaggcggaggccttcaaggcggagatcaagaagaccgacgtgaaagaggagaagaggaagaaagagctgaatgaaatcttgaaaagtacagtgagcagcaacgacaagaaaaccaaaggccggacaggctggccacagcacgtctgggccctggagctcaagcagtgaagagtctgggccctggagctcaagcagtaaag

SEQ ID NO: 1251 - DNA, 822 bp, Rattus norvegicus
aacaaacgccatgtcacagaccaaaacagcgaaggttcgcgtgaccctcttcttcatcctggcgggtggagtgctcgccatggtggccgtggtgaccgaccactgggccgtgctgagtccacacctggagcaccacaatgagacgtgcgtggcagcccacttcggcctttggaggatctgcaccacttgggttgccatgcacaaccaagacaagaactgtgacggcaccataccagcgggggaaaagaattgctcctacttcaggcacttcaacccaggagagagctcggaaatctttgaattcaccactcagaaggagtacagcatctcggcagcggccatcgctatcttcagccttggcttcatcatcataggctccatctgtgcctttctgtccttcgggaataagcgtgattacctgctaaggccggcatccatgttttatgcctttgcagggctctgcctcatcgtgtcggtggaggtcatgaggcagtcggtgaagcgtatgattgacagcgaggacacggtctggattgagtactattattcgtggtctttcgcctgcgcgtgtgccggcttcactttgctcttcctcggtgggctgtttctcctgctgttctccctgcctcggatgccccagaacccctgggaatcctgcatggacactgagtcagagcactagatcaaagcagagtctttcggaggtgaggagggagtctcacatctgccctgacttcttgtctatcgtgtgtctctccctctgagctcctctacaaacagtgcacatggacacaacccagacctgcccaggtcagaggaagc

SEQ ID NO: 1252 - DNA, 1320 bp, Rattus norvegicus
ctgcgcccggctgcatcccagggagcaccatggggcccagctgtctactcttcctgtgtctcctgctgtgcggaggcccagaactgtgctatccccagactcaatggcttttaccgggtggaacccccaccccagcggggtcctcatcacctgtggaggtggagtgtaaggaagctgagctagtggtgactgcccgtagagacctttttggcacagggaagctcgtgcagcccggggacctcacccttggctcagaaggctgtcagcccctcgtagcagtggatactgacgtagtcaggctcaacgcccagttgcatgaatgcagcagcggggtgcaggtgacagaagacgccctggtgtacagcacctttctgctccacgaccctcgccctgtgaatggcctgtctatcctaaggactaaccgggtggaggtccccattgagtgccgataccccaggcagggcaatgtgagcagccaccctatccaacccacctgggttcccttcagcgctactgtgtcctcggaggagaaactggctttctctcttcgtctgatggaggaggactggaatactgagaaatcatctcccaccttccacctgggagaggtagcccacctccaggcggaagtccagaccggaagccacctgcctctgcagttgtttgtggaccactgcgtggccacgccttcaccgttgccaggccagaactcctccccccatcacttcatcgtggactcccatggatgccttgtggacggtctatctgagagcttttcagcatttcaagtccctagaccccggccagagactctgcagttcacagtggacgtattccatttcgccaacagctccagaaatacggtttacatcacctgccatctcaaagtcgctccagctaaccagatccccgataagctcaacaaagcctgttccttcaacaagacttcccagagttggttgccagtagagggcgatgctgacatctgtgattgctgcagcaatggcaactgtagtaattcaagctcttcagagttcgagacccatgaaccagcccagtggtccacgctagtttctcgaaaccgcaggcacgtgacggatgaagctgatgtcactgtagggcccctgatattccttggaaaagcaaatgaccaggctgtggagggctggacctcttctgctcaaacctctgtggctctcggcttaggcttggccacagtggcattcctgaccctggctgctattgtccttggtgtcaccaggatgtgtcacacctcttcctaccttgtatcccttcctcaataaaagaagctcagttctg

SEQ ID NO: 1253 - DNA, 1022 bp, Rattus norvegicus
tccgacactagggtcgtgctacagaaagtcattcagatcatcggtttcattaacactatgttctccaagttgaaactgacggttttaataaattccgttgaaatctggtcgaaggaaaacagaattgatttcccagaggcacctgaaaacttactggtccagtttttacattggaaacataagtatagaccgcagcacatttcatacttactggcatttgtggagcatcctgcttccacgggagccctctatccggggaatctgtgcaaaccgatctatggtgctgccattgccctgtaccctaaaggtttgtcactagagtcctacagcgtcatcgtcctacaactactgagcatcggtataggcttaacctatgacaacgctgacagctgccactgtacaggagacgtctgcctgatgacgcccaaggcaatatattctgggggtgtgaaggacttcagtacttgtagcttggatgacttcaaatacctgtcaacacaagaccttgaatgtctccaggacttgcctatggaaagacaaaagaagaagccttccaggccaaggagaatctgtggcaacgggatattggaaatgaacgagcagtgtgactgtggcactttgaagaattgtacacacaaaaaatgctgtgaccccatgtcgtgccgactgaagtccaaagccgtgtgtggctccggggagtgctgtggtcaggactgcaaggtaaaaccggttaatgtactctgtagaaagtcgaagaatgaatgtgactttgaggagtactgtaacggaaatgacgcttactgtgtccctgacacgttcgcacgcaacgggcagtactgcgactcagggcaagccttctgctacagtggtctttgtatgacgagtaataatcaatgcatgaacttgctcgggaaatatgtgagaggagcttccttcgcatgctatgaagagttcaattccagaaacgatagatttggcaactgtattagaaagttttgtagtttcgaaaattctctctgtgg

SEQ ID NO: 1254 - DNA, 2717 bp, Rattus norvegicus
cggaggagacaagatggcgttgcgagcgatgcggggaatcgtgaacggggccgcgcccgagctgcccgtgcccaccggtgggccgatggccggagctcgggagcaggcgctggcggtgagccggaactacctctcccagcctcgtctcacctacaagactgtctctggagtgaatggtccactagtgatcttagatcatgtaaagtttcccagatatgctgagattgtccacttgacattaccagatggcacaaaaagaagtgggcaagttctagaagttagtggctccaaagccgtggttcaggtatttgaaggaacatccggcatagatgccaagaaaacatcctgtgagtttactggagatattctccgcacaccagtgtctgaggatatgcttggtcgagtattcaatggatcaggaaaacccattgaccgaggtcctgtggtgttggccgaagacttccttgacatcatgggtcagccaatcaaccctcagtgtcgcatctacccagaagagatgattcagacgggcatttctgccatcgatggcatgaacagtattgcgaggggacagaaaatccccatcttttctgctgccgggttaccacacaacgagattgcagctcagatctgtcgccaggctggtttggtaaagaaatccaaagacgtggtagactacagtgaagaaaactttgccattgtgtttgctgctatgggagtaaacatggaaacagcccggttcttcaaatctgactttgaagaaaatggctcaatggacaatgtctgccttttcttgaatctggctaatgacccaactatcgagaggatcatcactcctcgcctggctctgaccaccgctgagtttctggcttaccagtgtgagaagcatgtcctggtcatcctgacagatatgagttcttacgctgaagcacttcgagaggtttcagctgccagggaagaggttcctggtcggcgaggcttccccggctacatgtatacggatttagccaccatctatgaacgcgctgggcgagtggaaggtagaaatggctctattacccaaatccctattctcaccatgcccaatgatgatatcactcatcctatccctgacttgactgggtatattactgagggccagatctatgtggacagacagctgcacaacagacagatttaccctcctattaatgtgctgccctcactctctcggttaatgaagtcagctattggagaaggaatgaccaggaaggatcatgctgatgtgtctaaccagttgtacgcatgctatgctatcggtaaggatgtgcaagccatgaaagctgtggtgggagaagaagccctgacctcagatgacctcctttacttggaatttctgcagaagtttgagaaaaacttcattactcagggtccctatgaaaatcgaactgtctatgagactttggacattggctggcagttgcttcgaatcttccccaaagaaatgctgaagaggatccctcagagtaccctgagcgaattttaccctcgagactctgcaaagcactagctgctgctgcttgtgcggctcgaccctcttgtgaagtgctggttctgtttgctgattccttttgcactcctccatcccacctgtgtgtgggagttcacctgttaccctgtaattaaagacaaaggctaggtaactgttgtgccagtgttcagcgtttaaactgctaaccgattgagagatccccgctcagaacctcaccttctgtgctgtctttaaagtggcggaggtgaggcttgcttaccggtgtatctatttgtacatagtggagagctagttgcgaataatgtcttgtttgggtctcccaaaccctacctctcaactcccttaagagtatcactgttttgaagttaaaatgcttcagtctcaaatttaggggcaaggtggagactggaagaattctcctttcagaagaaccatgaggctcgtggctgagcctccctctggagtactagtgtacctgtgggtctgtcctctgctctgtgcagatgggttttactgtctgcttgagttttcttaggaaaagagttctgttctgccagtgctgcgagttgggattcctgtgtggccatctttctctttgaggcctaaagagtcaggcaccactgtgcagcggcattctcctgcaggggtggcgtgccttgtgctgatgacccccactgggctgcagtcataggagaactgagacttggaaaatgctggggcacagttaagaaaacctacatcccaccctcatcttgtgtttatggtggcttaggtctctgcattgccctccagatcctgaggtggggcatggagatgacttgccttaggtttgtggatgctttaaactctgctcagtcctcaagctttctgactcagctctcccttttctgggtgatcttgtggcacgtgtagcaatgtttctttcattcctgtcccttcctggcttgagctcttagctgtattctgtgtgcctctgccgtgtctgctgtttgggtctctgtgctgtgtgttctcaggtgcagccataacttccccactccgagcattccaccttccagttgtttttctctgaggggatgggggggcggtcagcatgattatattttaatgtagaaaatgtgacatctcgttataaatgaaaataaatgttaaattaaatggaaaaaaaaaaaaaaaaaaaaaaaaa

SEQ ID NO: 1255 - DNA, 2025 bp, Rattus norvegicus
tctgctgcctgcccaactgcctgcctgcctgtgccgagagttcccagcaccatgagggcctggatcttctttctcctttgcctggccgggagggccctggcagcgcctcagacggaagctgcagaagagatggtggcggaggaaaccgtggtggaggagacagggttacctgtgggtgccaacccagtccaggtggaaatgggagagtttgaagaaggtgcagaggaaactgtcgaggaggtggtggctgaaaacccctgccagaaccatcattgcaaacatggcaaggtgtgtgagctggacgagagcaacacccccatgtgtgtgtgccaggaccccaccagctgcccagctcccattggcgagtttgaaaaggtgtgcagcaatgacaacaagaccttcgactcttcctgccacttctttgcgaccaagtgcaccctggagggcaccaagaagggccacaagctccacctggactacatcggaccatgcaaatacattgccccctgcctggattctgagctgaccgaattccctctgcgcatgcgtgactggctcaaaaacgtcctggtcaccttgtacgagagagatgagggcaacaacctcctcactgagaagcagaaactgcgtgtgaagaagatccacgagaacgagaagcgcctggaggctggagaccaccctgtggagctgctggcccgagactttgagaagaactacaacatgtacatcttccctgtccactggcagtttggccagctggatcagcacccgattgatgggtacctgtcccacacggagctggccccactgcgcgctcccctcattcccatggaacattgcaccactcgcttctttgagacctgtgacctagacaatgacaagtacattgccctggaggaatgggccggctgcttcggcatcaaggagcaggacatcaacaaggatctggtgatctaagttcaagcctcctgcagcagtcctggactctctccccctgatgtccccacccacttccactacccccttgtttaaaatgtttggatggttggctgttctgcctggggataaggtgctaacatagatttaactgaatacattaacggtgctaaaaaaaaacaaaaaacaaaaaaaacagaaagaaagaaaccagatcccaagtcacagcattttcccacgttactcgactctgaggccatagcctatccacagcctcctcgtcccctgcaccgcccagtgtctcactggctgtgttggaaacgggaattgcataagcttgccttcctcaagcaagaaatatctctagctttcatttccattttgactcttaacactcacccagactctgtgcttatttcatttgggggggggtgtgggcttcctggggtcttcccctggtagtttggaggtaggcagagggaagttacagacacagatacaaaacttgggcaaggacgctgtgaggccagtcagaaccagatggcaagtcttggtagcctaggtcaacgactgacagaataatccagagctctgatgcacaaaacagactcccagcagcccgggaccttgctgtctcctccactcttcaggcagtttctttccatgtttggctgttggttttaattttggtgagccaaggggaggcatgggcagaccaatacctcactagggattctcttactcaactgctatagggctttcaggctcttgctgggagctctaggcactgggctacaggaaagtgagactcaagaggaagacagagaaggttgtaacgtagagagagtgagtcataaagtttcaagcatgccccccccacctctccccaccctttgccagttgaaacttactaatcaagagaaacttccaagccaacggaaggaatggtcggatcccacaggctgagaatttgttcccctccaagcatttcatgaaaaagctgcttctcattaaccatgcgaactctcacagtgatgtgaagagcttgacagatctttcaaaataaaaagtaatgacttagaaatggcc

SEQ ID NO: 1256 - DNA, 2124 bp, Rattus norvegicus
ggggggcgcgtgcggttgggaacgcggagcggacgaattcgattcaacggggttccgggccaggctatggagcaggtgaatgagctaaaggagaagggcaataaggccctgagtgctgggaacattgatgatgccttacagtgctactctgaggcaattaaactagatcctcagaaccatgtgctctatagcaatcgctctgcagcctatgccaagaaaggagactaccagaaggcgtatgaggacggttgcaagactgttgacctgaagcctgactggggcaagggttattcaagaaaagcagcagcccttgagttcctaaaccggtttgaagaagccaaacgaacctatgaagaaggtttaaaacatgaagccaataatctacagcttaaggaaggcttgcagaacatggaggccaggttggcagagaggaaatttatgaatcctttcaacttgcctaatctgtaccagaagttagagaatgatcccaggacaaggacactgctcagtgaccccacctacagggaactcatagagcaactacagaacaagccttcagacctgggcacgaaactccaagatccccgggtcatgactactctcagtgtcctccttggagttgatctgggcagtatggatgaagaggaagaggcagcaacacccccacctccaccccctcctaaaaaggaggccaagccagaaccaatggaagaagatcttccagagaataagaaacaggctctgaaagaaaaggagctgggaaatgatgcctacaagaagaaagattttgacaaggccctgaagcattatgacaaggccaaggagctggaccctaccaatatgacttacataactaatcaagcagctgtgcactttgagaagggcgactacaacaaatgccgggagctctgtgagaaggccattgaagtaggcagagagaaccgagaggactaccgtcagatcgccaaagcttatgctcgaattggcaattcctatttcaaagaagaaaggtacaaggatgctatccatttctacaacaagtctctggcagagcaccgaaccccagatgtgctcaagaagtgccagcaggcagagaaaattctgaaggaacaagagcgactggcttatatcaaccctgatttggctttggaggaaaagaataagggcaatgagtgcttccagaaaggggactacccccaggccatgaagcactatacagaagccattaaaaggaacccaagagatgccaaactatacagcaaccgagccgcctgctacaccaagctcctggagtttcagctggcactcaaggactgtgaagagtgcatccagctagagccaaccttcatcaagggttatacacggaaagcagctgccctggaagccatgaaggactatacaaaagccatggatgtgtaccagaaggcattagacctggactccagctgtaaggaagcagcagatggttaccaacgctgtatgatggcacagtacaacagacatgatagccctgaggatgtgaaacggcgggccatggctgaccctgaggtacagcagataatgagtgacccagccatgaggctcatcctggagcagatgcaaaaggacccccaagctctgagcgaacacttaaagaatcctgtaatagcacagaagatccagaagctgatggatgtgggtctgatcgcaattcggtgataacttgcttttcccctctccccttcgccgatgaggaaaggcgagctgggacggtggcaagcagtactgggcagaggggggagaagaaaggcttatctttatatttatacatgcctacaaggaagacagactcatccagtgccacctcgggccctcccagcacacgcatggtcttttcactgctgcccccaattccgaatatccttccctgcccattcccagcctccccgtcactgtctcagctgcttccctatagttggttattttttatttggggcagtgggtgcatacggggaggggagggtattcttcccaacctaaggtcccaactgtcttacttgttcttacccatgtcccccctcaataaaacaagccagtcaggcgtggttatatgtcaaaaaaaaaaaaaaaaaaaaaaaaaaaaaa

SEQ ID NO: 1257 - DNA, 684 bp, Rattus norvegicus
atgggcaactgcgtcaagtcgccactaagaaacctctcgagaaagatgcgccaggaggagaagaccagctacatggcggtgcagacaagtgaggatgggctggcggatggcggtgagctccctggaccactcatgatgctggcccagaactgtgcggtcatgcacaacctgctgggtcccgcctgcatctttctccgaaagggttttgccgagaacagacaacctgatagatcgttacgaccagaggagatcgaagagctccgagaggccttccgggaatttgacaaggacaaagatggctacatcaactgccgggacctggggaactgcatgcgcaccatgggctacatgcccactgagatggaactcatcgagctgtcccagcagatcaacatgaacctgggtggccacgtggatttcgatgactttgtggaactgatgggccctaaactcctggcggagacagcagatatgatcggtgtaaaggaactgagagacgcctttcgggagtttgacaccaacggtgacggggagataagcacgagcgagctgcgagaggccatgaggaagctcctgggtcatcaggtgggacaccgggacatagaggaaattatccgagacgtggacctcaatggagatggacgagtggacttcgaagagtttgtccggatgatgtctcgctga

SEQ ID NO: 1258 - DNA, 1116 bp, Rattus norvegicus
atgctcctggtgtctaccgtgtccgctgtgcctgggctcttttcaccccctagctctcccagcaacagcagccaggaggaactactggatgaccgagacccgctgctagtccgggctgaactggccctgctatctacaatttttgtggctgtggccttgagcaatggcctagtgctgggggccctaatacggcggggccggcgtggacgctgggcacccatgcatgtcttcatcagtcatttgtgcctggctgacctggctgtggctctgtttcaagtgctaccccagctggcttgggatgccactgaccgcttccatggccctgatgccctgtgtcgggccgtcaagtacctgcagatggtgggcatgtatgcctcctcctacatgatcctggccatgacactagaccgccatcgtgccatctgccgccctatgctagcataccgccatggaggtggggctcgctggaacaggccagtgctggtggcctgggccttctcactccttctcagcctgcctcagctcttcatctttgctcagcgtgatgtgggaaatggcagtggggtgtttgattgctgggcccgatttgcagaaccatggggccttcgtgcctatgtcacctggattgccttgatggtgtttgtggcacctgccctaggcattgctgcctgtcaggttcttatcttccgggagatacacgccagtctggtgccagggccatccgagagggcagggaggcgccgcagagggcgccggacaggaagccccagcgagggagcacatgtatcagcagccatggccaagaccgtgaggatgacactggtgattgtgattgtctacgtgctatgctgggcacccttcttcctcgtgcagctgtgggcagcgtgggatccggaagctcctctggaaagacccccctttgtgttgctcatgctgctggctagccttaacagctgtaccaacccttggatctatgcttccttcagtagcagtgtctcctcggagttgcgtagcctgctttgctgtgctcagaggcacaccacacacagcctgggtcctcaagatgaatcctgtgccacagccagctcctctttgatgaaggatacaccctcctga

SEQ ID NO: 1259 - DNA, 1474 bp, Rattus norvegicus
tgagaatgagaagattgtgccgctgagttcgtccttctctctgagatgcttcggggagagcgaagtgagctggcagcaccccatgtctgaagaagaggaccccaacgtggaaatcagaaccgaggagaacaacagtagcctctttgtcacggtgctggaagtggtcaacgcctcagcggcccacaccggatggtacacttgctattacaaccacactcagacagaagagagtgagatcgaaggcaggcacatttatatctatgtaccagacccagacatggccttcgtgcctctcggcatgacggattctttagtcattgtggaagaggacgattctgccatcataccctgccgcaccacggatccagacactgaagtaaccttgcacaataacgggaggctggtgcctgcctcctacgacagcaggcagggcttcaacggaaccttcagtgtggggccttacatctgtgaggccaccgtcagagggaggacgttcaagaccagcgagtttaacgtttatgccttgaaagccacgtcagaactgaatctggagatggacacacgccagactgtgtataaggcaggagaaacgatcgtggtgacctgcgccgtctttaacaatgaggtggttgacctgcagtggacttaccctggagaggtgagaaacaaaggcatcaccatgctggaggagatcaaactcccgtccatcaaactggtgtacacgctgaccgtccccaaggccacggtgaaggacagcggagattatgaatgtgctgcccgccaggccacgaaagaggtcaaggaaatgaagacagtcaccatttctgttcacgagaaaggcttcgtccagatcaggcccacctttggccatctggaaactgtgaacctgcatcaggtcagagagttcgtggtggaggtgcaggcctacccgacccccaggatatcctggctgaaggacaacttgaccctgattgagaatctcactgagatcaccaccgatgtgcagaggagccaggagacgaggtatcaaagcaaattaaagctgatccgggctaaggaagaagacagcggccattataccattatagttcagaatgacgacgacatgaagagctacacgtttgagctgtcaactctagttcctgcctccattctggagcttgtggatgaccaccatggctctggcgggggacagactgtgaggtgcacggctgaaggcacccctcttccgaacatcgagtggatgatctgcaaggatattaagaaatgtaataatgacacttcatggacagttttggccagcaacgtctcgaatattatcacggagttccaccagcgaggcaggagtacagtggagggacgagtgtccttcgccaaggtggaagagaccatcgcagttcggtgcttggcaaagaacgaccttggcattgggaacagagagctgaagctggtggctcccaccctgcgatctgag

SEQ ID NO: 1260 - DNA, 5403 bp, Rattus norvegicus
  misc_feature (1)..(5394): n = a or c or g or t
cggctaccctatctgggacataggattgctctgggagtaactttgagagagaaagagaacagagtccagagccagagcgggcccagaccagtcgtcagtctcctgcctgccagctagacctagggcggcccctcaggctgctccgctcctcccagaggatgcttttggagtgaggaggggccggtctgctcctctcccctgagcaccctctccattcccctgattctcccagggctttccgcaaccaggacaactcttctaccgctgtgctgtccgttttgagtccagcaaaataacaggacagcgaggaggacttcctggagggggtgatagcacacatcaggagccatctgtagcccgggcaccatggggcttccagaggtgatgccagcttcagtcctcagaggccaattgttgctgttcgtgctattgctcctgggaccacagatctcccaaggcctagtcatcacgccccctgggccagagttcgtcctcaacatttcgagcacctttgttctgacatgctcaagttcagctccagtgatgtgggaacagatgtcccaggtgccctggcaagaagcagccatgaaccaggatggcaccttctccagtgtgctgacactgactaatgtcactgggggagacaccggagaatacttttgtgtctacaacaactcactggggccagagctcagtgagcggaagcgcatctatatctttgtgccagatcccaccatgggcttcctcccgatggactctgaggacctattcatttttgtcacggatgtcactgagacgacgattccatgccgagtgacagacccccagctggaggtgacgctgcatgagaagaaagtggatatccccctacatgtaccctatgaccaccagcgaggtttcattggtacttttgaggacaagacttacatttgcaaaaccaccattggggacagggaagtggactccgatacttactatgtctacagcctgcaggtgtcatccatcaatgtctctgtgaatgcagtgcagactgtggtccgccagggcgagagcatcaccatcaggtgcatcgtgatgggcaatgatgtggtcaacttccagtggacgtacccccgcatgaagagtgggcggctggtggagccggtgacagattacctcttcggagtgccctcccgcattggctccattcttcatatccccaccgctgagctgagtgactctggcacctatacttgcaacgtgtcagtgagtgtgaatgaccacggcgatgagaaagccatcaacgttactgtgatcgaaaatggctatgtgcggctgctggaaacactggaagacgtacaaattgctgagctgcaccggagccggacgttgcaggtggtgtttgaggcttatccgacgccctctgtcctgtggttcaaggacaaccgtaccttgggtgactccagcgctggcgagttggttctgtccactcgcaacgtgtctgagacccggtatgtgtcagaactgaccttggtacgtgtgaaggtgtcagaagcgggctactataccatgcgggccttccatgcggacgaccaggtccagctctcattcaagctgcaggtcaatgtccctgtccgtgtactggagctgagtgagagtcatcctgccaatggggagcagatactccgctgtcggggccggggcatgcctcagccaaatgtcacctggtctacctgcagagacctcaaaaggtgtccgcgaaaactgtcacccacacccttggggaatagttccaaggaggagagccagctagaaacgaacgtgactttctgggaggaagatcaggaatatgaggtggtgagcacgctgcgcctgcgtcacgtggaccagccactgtcagtgcgctgtatgctgcagaactcgatgggcagagattcacaagaggtcaccgtggtaccacactccttgcctttcaaagtggtggtgatctcagccatcttggccttggtggtccttactgtcatctctctcatcatcctcatcatgctgtggcagaggaaaccacgctatgagatccgatggaaggtcattgagtctgtgagctctgacggccatgagtacatctatgtggatcctgtgcagttgccttacgactccacctgggagctgccacgggaccagcttgttctgggacgcactcttggctctggggctttcggacaggtggtggaggccaccgctcatggtctgagccactcacaagccaccatgaaagtggctgtcaagatgctgaaatctacagccagaagcagtgagaagcaagccctcatgtcggagttgaagatcatgagtcatctcggaccccacctgaacgtggtcaacctgctgggggcctgtaccaaaggagggcccatctacattatcacggaatactgccgttatggtgacctggtggactacctgcaccgaaacaaacacaccttcctgcaacgacactccaacaagcattgtccacccagcactgagctctacagcaacgccctgccggtggggctctccctacccagccacttgaacctgactggggagagcgacggtggttacatggacatgagcaaggatgaatctgtagattacgtgcccatgttggacatgaaaggacacatcaaatacgcggacatcgagtcctccagctacatggccccttacgataactatgtcccatctgcccctgaaaggacctatcgtgctaccttaatcaacgactcaccagtgctcagctacacagacctcgtgggcttcagttaccaagtggccaatggcatggaattcttggcctctaagaactgtgttcaccgagacctggcggccaggaatgtgctcatctgtgagggcaagttggtcaagatctgtgactttggcctggctcgagacatcatgcgggactcaaactacatctccaaaggcagtactttcctgcctctgaagtggatggccccagagagcatcttcaacagcctctacaccaccttgagtgatgtgtggtcctttggaatcctactctgggaaatcttcacactgggtggcaccccttacccagagctgcccatgaacgaccagttctacaatgccatcaagaggggctaccgcatggcccaacctgctcatgcctccgacgagatctatgagatcatgcagaaatgctgggaagaaaagtttgagactcggccccccttctctcagctggtgctgctcctggagaggcttctgggtgaaggctataaaaagaagtaccagcaggtggatgaggagtttctgaggagtgaccatccagccatcctgaggtcccaagcccgcttgccgggtctccacagcctccgatcccctctggataccagctctgtcctctacactgctgtgcagcctaatgagactgacaatgactacatcatccccttgcctgaccccaagcctgatgctgctgatgagggcctcctagagggttcccccagccttgccagctccaccttgaatgaagtcaacacttcttccaccatctcctgcgacagccccctggagctccaagaagagccgcaagcagagcctgaggcacagctggagcagccacaggattcaggctgcccaggacctctggctgaggcagaggacagcttcctgtagggactgactcccatccatcctgccagaaactcccatctgcctcctagcaccgaaccctcttggcctggcctggcctggcctggcctggcctcccagcagcaacactgccacaagctgtcccctcgaggaaagcccttggtttgccccacccaaggtccagggaccagcttcacttaggaggcaggagaactatggggactaagcctctgcttctgaaaggtcataggattctgaaccagggctcctccagaggactcagtttccccaaatataagaggaagagttgcacttggctacaggacaggtacggagcccggactcctgtagaaatccttgggtatacggtgatgtgttcacatcctcctgtgtagcaactgcccctcagctggatcattctactttgatcttcccaagaaccgggcaaagacccagtgcccggctcccggccaaaccgacaaaactgaagccagccttggacaaggtcatttcattcagaaccccctcccatggtcttagctttcccaggcccgagctggactggggccagccatgcttaatgaatgctgttagtgtgaaggtgagctgtgcacagaatgctctggcctgcagccccacccacggcactcagggtacacctggccacaggaagcacccactccttttagccccacgagtcctagaactggtcccttgtcactctcagtttgacctgcccaccagagtctgcagggccatggtccactcttgtgatatgctaaggatctgcctgacatgctcaccagtaggagccctggctctgcactgaacctgctatgagaccttgggggccttccttgttctctctgggtaacggttttctttcccctttgaaaaatgagcaagttggacacacagactctgagtaccctgtcactagtacaattctagtgtgttctgggagtttgctcttgtctggagaaagcagggtcaagtccttaaactaacctttctggggttggctgagctctcaaaagatcccagatacaccccacgatggggattcaggaaccgaaccttttcttcaagtcttcaagtgcaactgcccagaccttgactcggagtgacagttagtgtcctaggaaagtcccctacagctgtcctgaggacaaaggtcagaaaaagaccatgagacccttttcattccatgataaactttgaagccagcaagagtgacagagaaggcaagccagattacctcaggccactgtcaccagcagtgtggattgacatgatggacagtgaggacagatgtccagtgcaggacaagggacttgagatgggcatgagaggacgacgctgagggagccatctcaactgccagctgccccagtcctcaggcagcaccgcacagaaatgtttttaaccctgaaccaatggacactgcaagtgtctggggagtaaggagtgggggaagtcagccctcctgggaggcccttctgctggctggctggcagctccctgctggagcaacagaagctggggaatactgctcacaacggtaccaaagatgtattcacctaggtttacaagtactttgtaggactctcgatacccacatttagacacccggaagtgctattttgtatgctggtaaagtttcctatctgnactttttttttttttaaggggaaaatttaatattaaacttggggcttttcacagaattgcccaaaaaaaaaaaaaaaaaaaaaaaaaaaaaaaaaa

SEQ ID NO: 1261 - DNA, 628 bp, Rattus norvegicus
tgaattcctggaacctcaactggctcccactgctctctcggtgcagttaccgtttggcgatccctctcctgctaacatgccgttcgttgagttggaaacaaacttgccggctagccgcatacccgcagggctggagaaccggttgtgtgcggccacagccaccatcctggacaaacccgaagaccgcgtgagcgtgacgatacgaccgggcatgaccttgttgatgaacaaatccacagagccctgcgcccacctcctgatctcttccatcggtgttgtgggcaccgcggagcagaaccgcagccacagctccagcttcttcaagttcctcaccgaggagctgtccctggaccaggacaggatcattatccgattcttccccttggagccctggcagatcggaaagaaaggaactgttatgacgtttctgtgatggagacaaggaacgcagggcgtttgcttgagcctgtccagagcccttccagagaggcctcctggcagatacgataccagatccctcttttgcataagtgtctgtgatctcactgacctgttttcctctcccccagcctcgtgaacgagagagcaataaagaagagagcataatcccaaaaaaaaaaaaaaaaaa

SEQ ID NO: 1262 - DNA, 2950 bp, Rattus norvegicus
gaattccggagagaccacaagatagaggattattaatttatggggattttttggagatttatatacccaagcaacaactcctagatgctacagaccaagacaccaagaaataaccacgaaattctactttcaaccctagcttctctaccagattttaactaaacaagatcttcttgcaaaggtctcaggtatggatctttggcgggtgttcttaaccctggcactggcagtctccagcgacatgtttcctggaagtggggctacaccagctactcttggcaaagcttccccggttctgcaaagaattaatccaagcctgagggaaagttcctctggaaagcctcgattcaccaagtgtcgttcccctgaactggagaccttttcatgctactggacagaaggggatgatcataatttaaaggtcccgggatctattcagctatactatgctagaagaattgctcatgaatggaccccggaatggaaagaatgccctgattatgtctctgctggagcaaacagctgttacttcaactcatcgtatacctccatttggataccctactgcattaagcttactacaaatggtgatttgttggacgaaaagtgtttcactgttgatgaaatagtgcaacctgatccgcccattggcctcaactggactttactaaacatcagtttgcctgggatccgtggagatatccaagtgagttggcagccaccgcccagtgccgatgttctgaagggatggataattctggagtatgaaattcagtacaaagaagtaaatgaaacaaaatggaaaacgatgagcccgatatggtcaacatcagtcccactgtactcactgagactggataaagagcacgaagtgcgtgtgagatccagacaacggagcttcgaaaagtacagcgagttcagtgaagtactccgtgtaacgtttcctcagatggacacactggcagcatgtgaagaagatttccggtttccatggttcttaattattatctttggaatatttggagtagcagtgatgctatttgtagttatattttcaaagcagcaaaggattaagatgctgattttacccccagtaccagttccaaagattaaagggattgatccagatcttctcaaggaaggaaaattggaggaggtgaacaccatcttgggcattcatgataactacaaacccgacttctacaatgatgactcctgggttgagttcattgagctggatattgatgatgcggatgagaagactgaagagtcagacaccgacagacttctaagcgatgaccaggagaaatcagctggtatccttggagcaaaggatgacgattctggacgtaccagctgttatgaccctgacattttggataccgatttccacaccagtgacatgtgcgatggtacctcggagtttgctcagccgcagaagttaaaagcagaagctgatctcttgtgccttgaccagaagaatctgaagaactcgccttatgatgcttcccttggctctctgcacccctccattaccctgacaatggaagacaaaccacagccacttctgggcagtgaaactgagtcaacccaccaactcccctctacaccaatgagcagtcccgtgtcactggcaaacattgacttttatgcccaagtaagcgacattacaccagcaggtggtgtagtcctttctccaggccaaaagattaaggcagggttagcccagggcaacacccagctggaggtggccgcgccctgccaagaaaattacagcatgaacagtgcctacttctgtgagtcagatgccaaaaagtgcatcgctgcggcccctcacatggaggccacgacatgtgtaaaaccaagctttaaccaagaggacatttacatcaccacagaaagccttaccactactgcccgaatgtccgagacagcagataccgctccagatgctgagcctgtcccagactacaccacggttcacaccgtgaagtccccaaggggccttatactcaacgcgactgctttgcctttgcctgacaaaaagaagtttctctcctcatgtggctatgtgagcacagaccaactgaacaaaatcatgcagtagcctttcctatctttaatggcaaaagaaatgactgggcacgaacgcctaaaccaaaactatgttttaaatctgtgttgggagagcgtgagagtgaatgtggattcaaaaataccttttctggaaacgtcgaaacattatcataacgtggaaaatcaagaatatgtaatcagatagatactcccattgtgaattttaaatattttaagatcgtctttaagactgtttgtggcagtgattgtctgtgctgtgggtcttaactttgtgatactaagttattaaatagctacgtttttcatgtatgtagatcattgctttttttgaaaaagcaaaacaatcaggtggcttttgcagttcaggaaattgaatgcagattttagcacagactgatttctttttcctttttaaatagctaggagctaaaactctaggggagaaggtaaaactagtttggatatgcaaaacatttattttgacataaaattgataaagatatttttaataatttacactgtaagcatgagtattttataatacactacagatatattgttagttcacaacaatccatctacggatgtaacaactacaatgtgtagaggggttgatgctttggtcaatgaacctaaagaaaaatgaacaagttagatttttacaaagcccttttttataactcccaaaacttcttaaatctaaaaatgtctgcattattggaacaaacccattttaaatttgtaaatgaatatttttttaattttgaaaactttaattttttatacaaattaacgtatcatacaccaaacagtaacagaagtgattataataatggaagaaacagtttcttcc

SEQ ID NO: 1263 - DNA, 2572 bp, Rattus norvegicus
ggcacgagcgttccctcccctgagataccggcgccatgtccagcgctcggacccccctacccacgctgaacgaaagggacacggagcagcccaccttgggacaccttgattccaagcccagcagtaagtccaacatgctgcggggccgcaactcagccacctctgctgacgagcagccccatattggcaactacagactccttaagaccattggcaagggtaactttgccaaagtgaagttggcccggcacatcctgacggggaaagaggtagctgtgaagatcattgacaagactcagctgaattcctccagcctgcagaaactcttccgagaagtaagaataatgaaggttttgaatcatcccaacatagttaagttatttgaagtgatcgagactgagaagacgctctaccttgtcatggagtatgccagtggcggagaggtatttgattacctagtggcccatggcaggatgaaagaaaaagaagctcgagccaaatttcgccagatagtgtctgctgtgcagtactgtcaccagaagtttattgttcatagagatctaaaggcagaaaacctgctcctggatgctgatatgaacatcaagattgcagactttggctttagtaacgaattcacctttgggaacaagctggatactttctgtggtagtcctccttatgctgccccagaactcttccagggcaaaaagtatgacggtcctgaagtggatgtctggagcctgggcgtcatcctctatacactggtcagcgggtccctgccttttgatggacagaacctcaaggagctacgggaaagggtactgagggggaaataccgtattccattctacatgtccacggactgtgaaaatctgcttaagaaatttctcatacttaatcctagtaagagaggcactttggagcaaattatgaaagatcggtggatgaatgtgggccatgaggatgacgagctaaagccttacgtggagccactccctgactacaaggatccccggcggacagagttgatggtgtcaatgggttacacacgggaagagatccaggactcgctggtaggccagaggtacaacgaagtgatggctacctatctgctccttggctacaagagctctgagctggaaggtgacaccatcactttaaagccccggccttcagctgatctaaccaacagcagtgccccatctccatcccacaaagttcagcgcagcgtctctgccaaccccaagcagcggcgctccagtgaccaggccgtccccgccattcccacctcgaattcctactctaagaagactcagagtaacaacgcagaaaataagcggcctgaggaagagacagggcggaaagccagcagcaccgccaaagtgcctgccagccctctgcctggcctggacaggaagaagaccactcctaccccctccacaaacagcgtcctctccaccagcacaaacagaagcaggaactccccacttttggacagggccagccttggccaggcctccatccagaatggtaaagacagcacagccccccagcgtgtccctgtcgcctccccctccgcccacaacatcagcagcagtagtggagccccagaccgaactaatttcccacggggtgtgtccagtcgaagcaccttccatgctgggcagctccgacaggtgcgggaccagcagaatctgcccttcggtgtgaccccagcctcaccctctggccatagccagggccggcggggggcctctggcagcatcttcagcaagttcacctccaagtttgtccgcaggaacctgaatgaacctgaaagcaaagaccgagtggagacgctcagacctcacgtggtaggcggtggaggcactgacaaggaaaaggaagaatttcgggaggccaagcctcgttccctgcgcttcacttggagcatgaagaccacgagctctatggagcccaatgagatgatgcgggagatccgcaaggtgctggacgccaacagctgccaaagcgagctgcacgagcgatacatgctgctgtgcgtgcatggcacacccggccacgagaactttgtgcagtgggagatggaggtgtgcaaactgccccggctgtctctcaacggtgttcggtttaagcggatatcgggcacttccatggccttcaaaaacattgcctccaaaatagccaatgagctgaagctttaacaggctgtcaggaggggcggcagaggcccaccagtggacttggctgcttgggccaaacctgcatcccctgggagaaaaactgcaggatgaattggtgtgtctcccctgctggcacttgtccccttccaggcccttctcagttttttcttccatgtttgtgggggatgggaagtggtggttcctcctcccacattcacccctgcccagaagtctctcccttcccctctacccccgtacaggaggcaaaggaaggggaaggggttgggggggcagggctccccctcggtactgcggttgcacagagtatttcgcctaaaccaagaaaatttttattaccaaaaagaaaaaaagaaaaaaaaactcgtgcc

1. A method of predicting at least one toxic effect of a compound, comprising:
(a) detecting the level of expression in a tissue or cell sample exposed to the compound of ten or more genes from Table 1, 2 or 4; wherein differential expression of the genes in Table 1, 2 or 4 is indicative of at least one toxic effect.

2. (canceled)

3. A method of predicting the progression of a toxic effect of a compound, comprising:
(a) detecting the level of expression in a tissue or cell sample exposed to the compound of ten or more genes from Table 1, 2 or 4; wherein differential expression of the genes in Table 1, 2 or 4 is indicative of toxicity progression.

4. (canceled)

5. A method of predicting the cardiotoxicity of a compound, comprising:
(a) detecting the level of expression in a tissue or cell sample exposed to the compound of ten or more genes from Table 1, 2 or 4; wherein differential expression of the genes in Table 1, 2 or 4 is indicative of cardiotoxicity.

6. (canceled)

7. A method of identifying an agent that modulates the onset or progression of a toxic response, comprising:
(a) exposing an animal or a cell to the agent and a known toxin; and
(b) detecting the expression level of two or more genes from Table 1, 2 or 4; wherein differential expression of the genes in Table 1, 2 or 4 is indicative of toxicity.

8. A method of predicting the cellular pathways that a compound modulates in a cell, comprising:
(a) detecting the level of expression in a tissue or cell sample exposed to the compound of two or more genes from Table 1, 2 or 4; wherein differential expression of the genes in Table 1, 2 or 4 is associated with the modulation of at least one cellular pathway.

9. (canceled)

10. A method of predicting at least one toxic effect of a test compound, comprising:
(a) preparing a gene expression profile from a heart cell or tissue sample exposed to the test compound; and
(b) comparing the gene expression profile to a database comprising quantitative gene expression information for at least 10 genes, gene fragments of Table 1, 2 or 4 from a heart cell or tissue sample that has been exposed to at least one toxin and quantitative gene expression information for at least one gene, gene fragment of Table 1, 2 or 4 from a control heart cell or tissue sample exposed to the toxin excipient, thereby predicting at least one toxic effect of the test compound.

11. (canceled)

12. A method of predicting at least one toxic effect of a test agent comprising:
(a) providing nucleic acid hybridization data for a plurality of genes from at least one heart cell or tissue sample exposed to the test agent;
(b) converting the hybridization data from at least one gene corresponding to a gene or gene fragment of Table 1, 2 or 4 to a gene expression measure;
(c) generating a gene regulation score from the gene expression measure for said at least one gene;
(d) generating a sample prediction score for the agent; and
(e) comparing the sample prediction score to a cardiotoxicity reference prediction score, thereby predicting at least one toxic effect of the test agent.

13. (canceled)

14. A method of claim 12, wherein at least one cell or tissue sample is exposed to a test agent vehicle.

15. (canceled)

16. A method of claim 14, wherein the gene expression measure is a gene fold change value.

17. A method of claim 16, wherein the fold change value is calculated by a log scale linear additive model.

18. A method of claim 17, wherein the log scale linear additive model is a robust multi-array (RMA).

19. A method of claim 12, wherein the nucleic acid hybridization data has been screened by a quality control process that measures outlier data.

20. A method of claim 12, wherein step (c) comprises dimension reduction using Partial Least Squares (PLS).

21. A method of claim 12, wherein the sample prediction score is generated with a weighted index score for each gene.

22. A method of claim 21, wherein the weighted index score is a PLS score from Table 2.

23. A method of 12, wherein the sample prediction score for the agent is generated from the gene regulation score for said at least one gene.

24-26. (canceled)

27. A method of claim 12, wherein the toxicity reference prediction score is generated by a method comprising:
(a) providing nucleic acid hybridization data for a plurality of genes from at least one tissue or cell sample exposed to a cardiotoxin and at least one tissue or cell sample exposed to the toxin vehicle;
(b) converting the hybridization data from at least ten genes to fold change values;
(c) generating a gene regulation score from the fold change value for said at least ten genes; and
(d) generating a toxicity reference prediction score for the toxin.

28. A method of claim 27, wherein the cardiotoxin or non-cardiotoxin is selected from the group consisting of acyclovir, adriamycin, amphotericin B, BI compound, carboplatin, CCl4, cisplatin, clenbuterol, cyclophosphamide, dantrolene, dopamine, epinephrine, epirubicin, famotidine, hydralazine, ifosfamide, imatinib, isoproterenol, minoxidil, monocrotaline, norephinephrine, paroxetine, pentamidine, Pfizer compound, phenylpropanolamine, rosiglitazone, and temozolomide.

29-43. (canceled)

44. A method of providing a report comprising a prediction of at least one toxic effect of a test agent comprising:
(a) receiving nucleic acid hybridization data for a plurality of genes from at least one heart cell or tissue sample exposed to the test agent and at least one heart cell or tissue sample exposed to the test agent vehicle to a server via a remote link, wherein said plurality of genes is selected from the genes or gene fragments of Table 1, 2 or 4;
(b) converting the hybridization data from at least one gene to robust multi-array (RMA) fold change values;
(c) generating a gene regulation score from the RMA fold change value for said at least one gene;
(d) generating a sample prediction score for the agent;
(e) comparing the sample prediction score to a toxicity reference prediction score; and
(f) providing a report comprising information related to said at least one toxic effect.

45. (canceled)

46. A method of creating a toxicity model comprising:
(a) providing nucleic acid hybridization data for a plurality of genes from at least one heart cell or tissue sample exposed to a toxin;
(b) converting the hybridization data from at least one gene corresponding to a gene or gene fragment of Table 1, 2 or 4 to a gene expression measure;
(c) generating a gene regulation score from gene expression measure for said at least one gene;
(d) generating a toxicity reference prediction score for the toxin, thereby creating a toxicity model.

47-66. (canceled)

67. A computer system comprising:
(a) a computer readable medium comprising a toxicity model for predicting toxicity of a test agent, wherein the toxicity model is generated by a method of claim 46; and
(b) software that allows a user to predict at least one toxic effect of a test agent by comparing a sample prediction score to a toxicity reference prediction score in the toxicity model.

68. A computer system of claim 67, wherein the toxicity model comprises a model selected from Table 1, 2 or 4.

69-83. (canceled)

84. A computer readable medium comprising a data structure comprising at least one toxicity reference prediction score and software for accessing said data structure.

85-87. (canceled)

88. A solid support comprising at least two probes, wherein each of the probes comprises a sequence that specifically hybridizes to a gene or gene fragment in Table 1, 2 or 4.

89-98. (canceled)
